(19) United States
(12) Patent Application Publication
(10) Pub. No.: US 2026/0062699 A1
(43) Pub. Date: Mar. 5, 2026

(54) METHODS AND COMPOSITIONS FOR MODULATING SPLICING AT ALTERNATIVE SPLICE SITES

(71) Applicant: REMIX THERAPEUTICS INC., Watertown, MA (US)

(72) Inventors: Anant A. Agrawal, Waltham, MA (US); Frederic Vaillancourt, Newton, MA (US); Zaven Kaprielian, Rye, NY (US); Peter Smith, Arlington, MA (US); Alexander S. Harding, Boston, MA (US); Christopher Richer Neil, Bedford, MA (US); Maria Sarah Alexis, Boston, MA (US)

(21) Appl. No.: 19/103,514

(22) PCT Filed: Aug. 11, 2023
(86) PCT No.: PCT/US2023/030113

§ 371 Date: Feb. 12, 2025

Related U.S. Application Data
(60) Provisional application No. 63/397,661, filed on Aug. 12, 2022.

(51) Int. Cl. C12N 15/113; A61P 25/28

(52) U.S. Cl. CPC C12N 15/113; A61P 25/28; C12N 2310/11; C12N 2310/315; C12N 2310/321; C12N 2310/3231; C12N 2320/33

(57) ABSTRACT

The present disclosure features bifunctional oligonucleotides and related compositions that, inter alia, modulate nucleic CA acid splicing, e.g., splicing of a pre-mRNA, as well as methods of use thereof.

### CLAIM OF PRIORITY

[0001] This application claims priority to U.S. Patent Application No. 63/397,661, filed Aug. 12, 2022; the entire contents of the application is incorporated herein by reference in its entirety.

### BACKGROUND

[0002] Alternative splicing is a major source of protein diversity in higher eukaryotes and is frequently regulated in a tissue-specific or development stage-specific manner. Disease associated alternative splicing patterns are often mapped to changes in splice site signals or sequence motifs and regulatory splicing factors (Faustino and Cooper (2003) Genes Dev 17(4):419-437). As such, there is a need for novel compositions and methods for targeting alternative splicing pathways to provide useful treatment modalities.

### SUMMARY

[0003] The present invention relates to oligonucleotide compounds with a multipartite (e.g., bipartite) architecture useful, e.g., for targeting an exonic element (e.g., alternative splice sites) within certain genes, as well as compositions and related methods thereof. In one aspect, the present disclosure features a bifunctional oligonucleotide capable of (i) binding to a target sequence (e.g., an RNA, e.g., a pre-mRNA or mRNA) comprising an exonic element, such as an alternative splice site; and (ii) recruiting a spliceosome component. In an embodiment, the bifunctional oligonucleotide is capable of modulating splicing of a target sequence, e.g., at an alternative splice site. In an embodiment, the bifunctional oligonucleotide is capable of modulating the production or level of a transcription product (e.g., an RNA, e.g., a pre-mRNA, or mRNA) or a target protein. In an embodiment, the target sequence contains repeated trinucleotides (e.g., more than 2, 5, 8, 10, 12, 14, 16, 18, 20, 22, 24, 26, 28, 30, 32, 34, 36, 38, 40, 42, 44, 46, 48, 50, 52, 54, 56, 60, or more repeated trinucleotides). In an embodiment, the target sequence is present within a mutant gene, e.g., a gene comprising at least one mutation, e.g., one repeated trinucleotide sequence. In an embodiment, the target sequence is present within a gene associated with a disease, disorder, or condition, such as a neurological disease or disorder, e.g., Huntington's disease (HD).

[0004] In an embodiment, the bifunctional oligonucleotide comprises: (i) an alternative splice site targeting sequence and (ii) a spliceosome targeting sequence. In an embodiment, the alternative splice site targeting sequence binds to a target sequence comprising an alternative splice site. In an embodiment, the alternative splice site targeting sequence binds directly to the alternative splice site. In an embodiment, the alternative splice site targeting sequence binds to a region in the target sequence that is 5′ to the alternative splice site. In an embodiment, the alternative splice site targeting sequence binds to a region in the target sequence that is 3′ to the alternative splice site. In an embodiment, the alternative splice site targeting sequence is a 5′ splice site sequence. In an embodiment, the alternative splice site targeting sequence is present at the 5′ or 3′ region of the bifunctional oligonucleotide. In an embodiment, the alternative splice site targeting sequence is present at the 5′ region of the bifunctional oligonucleotide. In an embodiment, the alternative splice site targeting sequence is present at the 3′ region of the bifunctional oligonucleotide.

[0005] In an embodiment, the alternative splice site targeting sequence is between 5 and 50 nucleotides in length (e.g., 5 to 45 nucleotides, 5 to 40 nucleotides, 5 to 35 nucleotides, 5 to 30 nucleotides, or 5 to 25 nucleotides in length). In an embodiment, the alternative splice site targeting sequence is between 5 and 50 nucleotides in length (e.g., 10 to 50 nucleotides, 15 to 50 nucleotides, 20 to 50 nucleotides, or 25 to 50 nucleotides in length).

[0006] In an embodiment, the spliceosome targeting sequence is between 5 and 50 nucleotides in length (e.g., 5 to 45 nucleotides, 5 to 40 nucleotides, 5 to 35 nucleotides, 5 to 30 nucleotides, or 5 to 25 nucleotides in length). In an embodiment, the spliceosome targeting sequence is between 5 and 25 nucleotides in length (e.g., 10 to 25 nucleotides or 15 to 25 nucleotides). In an embodiment, the spliceosome targeting sequence is present at the 5′ or 3′ region of the bifunctional oligonucleotide. In an embodiment, the spliceosome targeting sequence is present at the 5′ region of the bifunctional oligonucleotide. In an embodiment, the spliceosome targeting sequence is present at the 3′ region of the bifunctional oligonucleotide.

[0007] In an embodiment, the bifunctional oligonucleotide comprises a chemical modification, e.g., a non-naturally occurring modification. In an embodiment, the chemical modification comprises a nucleobase modification, a sugar (e.g., ribose) modification, an internucleotide modification, or a terminal modification. In an embodiment, the non-naturally occurring modification is a sugar (e.g., ribose) modification. In an embodiment, the non-naturally occurring modification is 2′-ribose modification, e.g., a 2′-O-alkyl (e.g., 2′-OMe), 2′-halo (e.g., 2′-F, 2′-Cl, or 2′-Br), 2′-methoxyethyl (2′-MOE), or 2′-deoxy modification. In an embodiment, the non-naturally occurring modification is a locked nucleic acid. In an embodiment, the non-naturally occurring modification is an internucleotide modification, e.g., a phosphorothioate modification. In an embodiment, the bifunctional oligonucleotide comprises a plurality of chemical modifications, e.g., at least 2, 3, 4, 5, 6, 7, 8, 9, 10, 11, 12, 13, 14, 15, 16, 17, 18, 19, 20, 21, 22, 23, 24, 25, 26, 27. 28, 29, 30, 31, 32, 33, 34, 35, 36, 37, 38, 39, 40, or more chemical modifications. In an embodiment, the bifunctional oligonucleotide comprises between 2 and 50 chemical modifications, e.g., between 5 and 45 chemical modifications, between 10 and 40 chemical modifications, between 15 and 35 chemical modifications, or between 20 and 30 chemical modifications. In an embodiment, at least 10%, 20%, 30%, 40%, 50%, 60%, 70%, 80%, 90%, 95%, or more nucleotides within the bifunctional oligonucleotide comprise a chemical modification. In an embodiment, every nucleotide within the bifunctional oligonucleotide comprises a chemical modification. In an embodiment, the bifunctional oligonucleotide does not comprise a chemical modification.

[0008] In another aspect, the present disclosure provides methods for preventing and/or treating a disease, disorder, or condition in a subject or cell by administering a bifunctional oligonucleotide described herein, or a pharmaceutically acceptable salt thereof, or related compositions, to the subject or cell. In some embodiments, the disease or disorder entails unwanted or aberrant splicing. In some embodiments, the disease or disorder is a repeat expansion disease. In some embodiments, the disease or disorder is a neurological disease or disorder. In some embodiments, the disease or disorder comprises Huntington's disease, Huntington's disease-like 2, holoprosencephaly 5, spinocerebellar ataxia type 1, spinocerebellar ataxia type 2, spinocerebellar ataxia type 3, spinocerebellar ataxia type 7, spinocerebellar ataxia type 8, spinocerebellar ataxia type 17, myotonic dystrophy type 1, oculopharyngodistal myopathy 2, oculopharyngodistal myopathy with leukoencephalopathy, X-linked intellectual disability, dentatorubral-pallidoluysian atrophy, spinal and bulbar atrophy, cleidocranial dysplasia, synpolydactyly 1, glutaminase deficiency, Jacobsen syndrome, fragile X syndrome, fragile X-associated primary ovarian insufficiency, fragile X-associated tremor/ataxia syndrome, X-linked hypopituitarism, or congenital central hypoventilation syndrome. In some embodiments, the disease or disorder is Huntington's disease.

[0009] In another aspect, the present disclosure provides methods of down-regulating the expression of (e.g., the level of or the rate of production of) a target nucleic acid (e.g., RNA) or target protein with a bifunctional oligonucleotide described herein, or a pharmaceutically acceptable salt thereof, or related compositions. In another aspect, the present disclosure provides methods of up-regulating the expression of (e.g., the level of or the rate of production of) a target nucleic acid (e.g., RNA) or target protein with a bifunctional oligonucleotide described herein, or a pharmaceutically acceptable salt thereof, or related compositions. In another aspect, the present disclosure provides methods of altering the isoform of a target nucleic acid (e.g., RNA) or target protein with a bifunctional oligonucleotide described herein, or a pharmaceutically acceptable salt thereof, or related compositions. Another aspect of the disclosure relates to methods of inhibiting the activity of a target nucleic acid (e.g., RNA) or target protein in a biological sample or subject. In some embodiments, administration of a bifunctional oligonucleotide to a biological sample, a cell, or a subject comprises inhibition of cell growth or induction of cell death.

[0010] In another aspect, the present disclosure features a method of modulating the production or level of a transcription product in a cell or subject comprising an exonic element (e.g., an alternative splice site within or near a trinucleotide expansion, e.g., a [CAG]ₙ site) in a subject or cell, wherein (i) the exonic element is flanked by a proximal splice site and a distal splice site, and (ii) the proximal splice site and distal splice sites are both 5′ splice sites or are both 3′ splice sites; comprising contacting said cell or subject with a bifunctional oligonucleotide capable of promoting splicing at (a) the distal 5′ splice site to (a-i) decrease the production or level of a transcription product comprising the exonic element or (a-ii) increase the production or level of a transcription product lacking the exonic element; or (b) the proximal 3′ splice site to (b-i) increase the production or level of a transcription product comprising the exonic element or (b-ii) decrease the production or level of a transcription product lacking the exonic element; thereby modulating the production or level of a transcription product comprising an exonic element (e.g., an alternative splice site within or near a trinucleotide expansion, e.g., a [CAG]ₙ site). In an embodiment, the method comprises (a-i) or (a-ii). In an embodiment, the method comprises (a-i). In an embodiment, the method comprises (b-i) or (b-ii). In an embodiment, the method comprises (b-i).

[0011] In an embodiment, the distal 5′ splice site is a non-canonical 5′ splice site (e.g., an alternative 5′ splice site). In an embodiment, the proximal 5′ splice site is a canonical 5′ splice site. In an embodiment, the distal 5′ splice site is a non-canonical 5′ splice site (e.g., an alternative 5′ splice site) and the exonic element comprises a canonical 5′ spice site. In an embodiment, the production or level of a transcription product produced by splicing at the distal 5′ splice site is increased by at least 1%, 5%, 10% 15%, 20%, 25%, 30%, 40%, or 50%, e.g., in comparison to a reference standard (e.g., the transcription product produced by splicing at a proximal 5′ splice site, wild type transcription product, or mutant transcription product).

[0012] In another aspect, the present disclosure provides compositions for use in preventing and/or treating a disease, disorder, or condition in a subject by administering a bifunctional oligonucleotide described herein, or a pharmaceutically acceptable salt thereof, or related compositions. In some embodiments, the disease or disorder entails unwanted or aberrant splicing. In some embodiments, the disease or disorder is a repeat expansion disease. In some embodiments, the disease or disorder is a neurological disease or disorder. In some embodiments, the disease or disorder comprises Huntington's disease, Huntington's disease-like 2, holoprosencephaly 5, spinocerebellar ataxia type 1, spinocerebellar ataxia type 2, spinocerebellar ataxia type 3, spinocerebellar ataxia type 7, spinocerebellar ataxia type 8, spinocerebellar ataxia type 17, myotonic dystrophy type 1, oculopharyngodistal myopathy 2, oculopharyngodistal myopathy with leukoencephalopathy, X-linked intellectual disability, dentatorubral-pallidoluysian atrophy, spinal and bulbar atrophy, cleidocranial dysplasia, synpolydactyly 1, glutaminase deficiency, Jacobsen syndrome, fragile X syndrome, fragile X-associated primary ovarian insufficiency, fragile X-associated tremor/ataxia syndrome, X-linked hypopituitarism, or congenital central hypoventilation syndrome. In some embodiments, the disease or disorder is Huntington's disease.

[0013] In another aspect, the present disclosure features kits comprising a container with a bifunctional oligonucleotide described herein, or a pharmaceutically acceptable salt thereof, or related compositions. In certain embodiments, the kits described herein further include instructions for administering the bifunctional oligonucleotide or the pharmaceutically acceptable salt, solvate, hydrate, tautomer, stereoisomer thereof, or the pharmaceutical composition thereof.

[0014] The details of one or more embodiments of the invention are set forth herein. Other features, objects, and advantages of the invention will be apparent from the Detailed Description, the Examples, and the Claims.

### BRIEF DESCRIPTION OF DRAWINGS

[0015] FIGS. 1A-1B are schematics demonstrating exemplary orientations for the bifunctional oligonucleotide. In these renderings, the bifunctional oligonucleotide comprises a bipartite architecture, with both an alternative splice site targeting sequence (dark gray) and a spliceosome targeting sequence (light gray). The U1 snRNP complex is depicted as a gray circle binding to the bifunctional oligonucleotides.

[0016] FIG. 2 is a bar graph demonstrating the beneficial effect of chemical modifications, specifically the locked nucleic acids (LNAs), on the bifunctional oligonucleotides, for an exemplary target gene.

### DETAILED DESCRIPTION

[0017] The present invention relates to bifunctional oligonucleotides and related compositions and methods, useful for modulating splicing at a target sequence. Exemplary target sequences include target sequences comprising an alternative splice site and can be correlated, for example, with a repeat expansion disease (e.g., Huntington's disease).

### Definitions

[0018] Unless defined otherwise, all technical and scientific terms used herein have the same meaning as commonly understood by one of ordinary skill in the art to which the invention pertains.

[0019] As used herein, the terms “a” and “an” refer to one or to more than one (i.e., to at least one) of the grammatical object of the article. By way of example, “an element” means one element or more than one element.

[0020] “About” and “approximately” shall generally mean an acceptable degree of error for the quantity measured given the nature or precision of the measurements. Exemplary degrees of error are within 20 percent (%), typically, within 10%, and more typically, within 5% of a given value or range of values.

[0021] As used herein, the terms “acquire” or “acquiring,” refer to obtaining possession of a value, e.g., a numerical value, or image, or a physical entity (e.g., a sample), by “directly acquiring” or “indirectly acquiring” the value or physical entity. “Directly acquiring” means performing a process (e.g., performing an analytical method or protocol) to obtain the value or physical entity. “Indirectly acquiring” refers to receiving the value or physical entity from another party or source (e.g., a third-party laboratory that directly acquired the physical entity or value). Directly acquiring a value or physical entity includes performing a process that includes a physical change in a physical substance or the use of a machine or device. Examples of directly acquiring a value include obtaining a sample from a human subject. Directly acquiring a value includes performing a process that uses a machine or device, e.g., a fluorimeter to acquire fluorescence data.

[0022] The term “alternative splice site,” as used herein, refers to a non-canonical splice site, e.g., within a specific pre-mRNA sequence. Splicing at an alternative splice site by the spliceosome may result in a difference in the sequence of the target, thus contributing to the diversity of the proteome. An alternative splice site may be present 5′ or 3′ to the canonical splice site in pre-mRNA sequence.

[0023] The term “at least” prior to a number or series of numbers is understood to include the number adjacent to the term “at least”, and all subsequent numbers or integers that could logically be included, as clear from context. For example, the number of nucleotides in a nucleic acid molecule must be an integer. For example, “at least 18 nucleotides of a 21-nucleotide nucleic acid molecule” means that 18, 19, 20, or 21 nucleotides have the indicated property. When at least is present before a series of numbers or a range, it is understood that “at least” can modify each of the numbers in the series or range. “At least” is also not limited to integers (e.g., “at least 5%” includes 5.0%, 5.1%, and 5.18% without consideration of the number of significant figures.)

[0024] A “distal splice site,” as used herein, refers to a splice site wherein the exonic element is disposed between the distal splice site and the cognate intron.

[0025] The term “exonic element,” as used herein, refers to a nucleotide sequence within an exon comprising a sequence of interest, e.g., a repeated trinucleotide sequence, such as [CAG]ₙ when n is greater than 5, e.g., greater than 8, 10, 12, 16, 18, or more.

[0026] The term “expression” refers to the transcription and/or translation of a particular nucleotide sequence driven by a promoter.

[0027] The term “oligonucleotide,” as used herein, is defined as it is generally understood by the skilled person as a molecule comprising two or more covalently linked nucleosides. Such covalently bound nucleosides can be referred to as nucleic acid molecules or oligomers. Oligonucleotides are commonly made in the laboratory by solid-phase chemical synthesis followed by purification. When referring to a sequence of the oligonucleotide, reference is made to the sequence or order of nucleobase moieties, or modifications thereof, of the covalently linked nucleotides or nucleosides. The oligonucleotide can, for example, be chemically synthesized, and be purified or isolated. The oligonucleotide is also intended to include (i) compounds that have one or more furanose moieties that are replaced by furanose derivatives or by any structure, cyclic or acyclic, that can be used as a point of covalent attachment for the base moiety, (ii) compounds that have one or more phosphodiester linkages that are either modified, as in the case of phosphoramidate or phosphorothioate linkages, or completely replaced by a suitable linking moiety as in the case of formacetal or riboacetal linkages, and/or (iii) compounds that have one or more linked furanose-phosphodiester linkage moieties replaced by any structure, cyclic or acyclic, that can be used as a point of covalent attachment for the base moiety. The oligonucleotide can comprise one or more alternative nucleosides or nucleotides (e.g., including those described herein). It is also understood that oligonucleotide includes compositions lacking a sugar moiety or nucleobase but are still capable of forming a pairing with or hybridizing to a target sequence.

[0028] The term “nucleic acid” refers to deoxyribonucleic acids (DNA) or ribonucleic acids (RNA) and polymers thereof, e.g., in either single- or double-stranded form. The term “nucleic acid” includes a gene, cDNA, pre-mRNA or an mRNA. In one embodiment, the nucleic acid molecule is synthetic (e.g., chemically synthesized) or recombinant. Unless specifically limited, the term encompasses nucleic acids containing natural and/or synthetic analogues or derivatives of natural nucleotides and/or non-natural internucleoside linkages, that have similar binding properties as the reference nucleic acid and are metabolized in a manner similar to naturally occurring nucleotides. Unless otherwise indicated, a particular nucleic acid sequence also implicitly encompasses conservatively modified variants thereof (e.g., degenerate codon substitutions), alleles, orthologs, SNPs, and complementarity sequences as well as the sequence explicitly indicated.

[0029] As used herein, an amount of a bifunctional oligonucleotide “effective to treat a disorder,” (e.g., a disorder described herein), “therapeutically effective amount,” “effective amount” or “effective course” refers to an amount of a bifunctional oligonucleotide which is effective, upon single or multiple dose administration(s) to a subject, in treating a subject, or in curing, alleviating, relieving or improving a subject with a disorder (e.g., a repeat expansion disease) beyond that expected in the absence of such treatment.

[0030] As used herein, the terms “prevent” or “preventing” as used in the context of a disorder or disease, refer to administration of an agent to a subject, e.g., the administration of a bifunctional oligonucleotide of the present disclosure to a subject, such that the onset of at least one symptom of the disorder or disease is delayed as compared to what would be seen in the absence of administration of said treatment.

[0031] A “proximal splice site,” as used herein, refers to a splice site disposed between the exonic element and the proximal splice site's cognate intron.

[0032] As used herein, the term “subject” is intended to include human and non-human animals. Exemplary human subjects include a human patient having a disorder, e.g., a disorder described herein, or a normal subject. The term “non-human animals” includes all vertebrates, e.g., non-mammals (such as chickens, amphibians, reptiles) and mammals, such as non-human primates, domesticated and/or agriculturally useful animals, e.g., sheep, dogs, cats, cows, pigs, etc.

[0033] As used herein, the terms “treat” or “treating” a subject having a disorder or disease refer to subjecting the subject to a regimen, e.g., the administration of a bifunctional oligonucleotide or pharmaceutically acceptable salt thereof, or a composition comprising a bifunctional oligonucleotide or pharmaceutically acceptable salt thereof, such that at least one symptom of the disorder or disease is cured, healed, alleviated, relieved, altered, remedied, ameliorated, or improved. Treating includes administering an amount effective to alleviate, relieve, alter, remedy, ameliorate, improve or affect the disorder or disease, or the symptoms of the disorder or disease. The treatment may inhibit deterioration or worsening of a symptom of a disorder or disease. In some embodiments, treatment comprises prevention. In some embodiments, treatment does not comprise prevention.

[0034] Numerous ranges, e.g., ranges for the amount of a bifunctional oligonucleotide or a composition thereof administered per day, are provided herein. In some embodiments, the range includes both endpoints. In other embodiments, the range excludes one or both endpoints. By way of example, the range can exclude the lower endpoint. Thus, in such an embodiment, a range of 100 to 1000 mg/day, excluding the lower endpoint, would cover an amount greater than 100 that is less than or equal to 1000 mg/day.

### Chemical Definitions

[0035] Definitions of specific functional groups and chemical terms are described in more detail below. The chemical elements are identified in accordance with the Periodic Table of the Elements, CAS version, Handbook of Chemistry and Physics, 75^{th} Ed., inside cover, and specific functional groups are generally defined as described therein. Additionally, general principles of organic chemistry, as well as specific functional moieties and reactivity, are described in Organic Chemistry, Thomas Sorrell, University Science Books, Sausalito, 1999; Smith and March March's Advanced Organic Chemistry, 5^{th} Edition, John Wiley & Sons, Inc., New York, 2001; Larock, Comprehensive Organic Transformations, VCH Publishers, Inc., New York, 1989; and Carruthers, Some Modern Methods of Organic Synthesis, 3^{rd} Edition, Cambridge University Press, Cambridge, 1987.

[0036] The abbreviations used herein have their conventional meaning within the chemical and biological arts. The chemical structures and formulae set forth herein are constructed according to the standard rules of chemical valency known in the chemical arts.

[0037] When a range of values is listed, it is intended to encompass each value and sub-range within the range. For example, “C₁-C₆ alkyl” is intended to encompass, C₁, C₂, C₃, C₄, C₅, C₆, C₁-C₆, C₁-C₅, C₁-C₄, C₁-C₃, C₁-C₂, C₂-C₆, C₂-C₅, C₂-C₄, C₂-C₃, C₃-C₆, C₃-C₅, C₃-C₄, C₄-C₆, C₄-C₅, and C₅-C₆ alkyl.

[0038] The following terms are intended to have the meanings presented therewith below and are useful in understanding the description and intended scope of the present invention.

[0039] As used herein, “alkyl” refers to a radical of a straight-chain or branched saturated hydrocarbon group having from 1 to 36 carbon atoms (“C₁-C₃₆ alkyl”). In some embodiments, an alkyl group has 1 to 32 carbon atoms (“C₁-C₃₂ alkyl”). In some embodiments, an alkyl group has 1 to 24 carbon atoms (“C₁-C₂₄ alkyl”). In some embodiments, an alkyl group has 1 to 18 carbon atoms (“C₁-C₁₈ alkyl”). In some embodiments, an alkyl group has 1 to 12 carbon atoms (“C₁-C₁₂ alkyl”). In some embodiments, an alkyl group has 1 to 8 carbon atoms (“C₁-C₈ alkyl”). In some embodiments, an alkyl group has 1 to 7 carbon atoms (“C₁-C₇ alkyl”). In some embodiments, an alkyl group has 1 to 6 carbon atoms (“C₁-C₆ alkyl”). In some embodiments, an alkyl group has 1 to 5 carbon atoms (“C₁-C₅ alkyl”). In some embodiments, an alkyl group has 1 to 4 carbon atoms (“C_{L}-C₄ alkyl”). In some embodiments, an alkyl group has 1 to 3 carbon atoms (“C₁-C₃ alkyl”). In some embodiments, an alkyl group has 1 to 2 carbon atoms (“C₁-C₂ alkyl”). In some embodiments, an alkyl group has 1 carbon atom (“C₁ alkyl”). In some embodiments, an alkyl group has 2 to 6 carbon atoms (“C₂-C₆ alkyl”). Examples of C₁-C₂₄ alkyl groups include methyl (C₁), ethyl (C₂), n-propyl (C₃), isopropyl (C₃), n-butyl (C₄), tert-butyl (C₄), sec-butyl (C₄), iso-butyl (C₄), n-pentyl (C₅), 3-pentanyl (C₅), amyl (C₅), neopentyl (C₅), 3-methyl-2-butanyl (C₅), tert-amyl (C₅), n-hexyl (C₆), octyl (C₅), nonyl (C₉), decyl (C₁₀), undecyl (C₁₁), dodecyl (or lauryl) (Ct2), tridecyl (C₁₃), tetradecyl (or myristyl) (C₁₄), pentadecyl (C₁₅), hexadecyl (or cetyl) (C₁₆), heptadecyl (C₁₇), octadecyl (or stearyl) (C₁₈), nonadecyl (C₁₉), eicosyl (or arachidyl) (C₂₀), henicosanyl (C₂₁), docosanyl (C₂₂), tricosanyl (C₂₃), and tetracosanyl (C₂₄). Each instance of an alkyl group may be independently optionally substituted, i.e., unsubstituted (an “unsubstituted alkyl”) or substituted (a “substituted alkyl”) with one or more substituents; e.g., for instance from 1 to 5 substituents, 1 to 3 substituents, or 1 substituent.

[0040] As used herein, “alkenyl” refers to a radical of a straight-chain or branched hydrocarbon group having from 2 to 36 carbon atoms, one or more carbon-carbon double bonds, and no triple bonds (“C₂-C₃₆ alkenyl”). In some embodiments, an alkenyl group has 2 to 32 carbon atoms (“C₂-C₃₂ alkenyl”). In some embodiments, an alkenyl group has 2 to 24 carbon atoms (“C₂-C₂₄ alkenyl”). In some embodiments, an alkenyl group has 2 to 18 carbon atoms (“C₂-C₁₅ alkenyl”).

[0041] In some embodiments, an alkenyl group has 2 to 12 carbon atoms (“C₂-C₁₂ alkenyl”). In some embodiments, an alkenyl group has 2 to 8 carbon atoms (“C₂-C₅ alkenyl”). In some embodiments, an alkenyl group has 2 to 7 carbon atoms (“C₂-C₇ alkenyl”). In some embodiments, an alkenyl group has 2 to 8 carbon atoms (“C₂-C₅ alkenyl”). In some embodiments, an alkenyl group has 2 to 6 carbon atoms (“C₂-C₆ alkenyl”). In some embodiments, an alkenyl group has 2 to 5 carbon atoms (“C₂-C₅ alkenyl”). In some embodiments, an alkenyl group has 2 to 4 carbon atoms (“C₂-C₄ alkenyl”). In some embodiments, an alkenyl group has 2 to 3 carbon atoms (“C₂-C₃ alkenyl”). In some embodiments, an alkenyl group has 2 carbon atoms (“C₂ alkenyl”). The one or more carbon-carbon double bonds can be internal (such as in 2-butenyl) or terminal (such as in 1-butenyl). The one or more carbon double bonds can have cis or trans (or E or Z) geometry. Examples of C₂-C₄ alkenyl groups include ethenyl (C₂), 1-propenyl (C₃), 2-propenyl (C₃), 1-butenyl (C₄), 2-butenyl (C₄), butadienyl (C₄), and the like. Examples of C₂-C₂₄ alkenyl groups include the aforementioned C₂₋₄ alkenyl groups as well as pentenyl (C₅), pentadienyl (C₅), hexenyl (C₆), and the like. Additional examples of alkenyl include heptenyl (C₇), octenyl (C₅), octatrienyl (C₅), nonenyl (C₉), nonadienyl (C₉), decenyl (C₁₀), decadienyl (C₁₀), undecenyl (C₁₁), undecadienyl (C₁₁), dodecenyl (C₁₂), dodecadienyl (C₁₂), tridecenyl (C₁₃), tridecadienyl (C₁₃), tetradecenyl (C₁₄), tetradecadienyl (e.g., myristoleyl) (C₁₄), pentadecenyl (C₁₅), pentadecadienyl (C₁₅), hexadecenyl (e.g., palmitoleyl) (C₁₆), hexadecadienyl (C₁₆), heptadecenyl (C₁₇), heptadecadienyl (C₁₇), octadecenyl (e.g., oleyl) (C₁₈), octadecadienyl (e.g., linoleyl) (C₁₈), nonadecenyl (C₁₉), nonadecadienyl (C₁₉), eicosenyl (C₂₀), eicosadienyl (C₂₀), eicosatrienyl (C₂₀), and the like. Each instance of an alkenyl group may be independently optionally substituted, i.e., unsubstituted (an “unsubstituted alkenyl”) or substituted (a “substituted alkenyl”) with one or more substituents e.g., for instance from 1 to 5 substituents, 1 to 3 substituents, or 1 substituent. In certain embodiments, the alkenyl group is unsubstituted C₂₋₁₀ alkenyl.

[0042] As used herein, the term “alkynyl” refers to a radical of a straight-chain or branched hydrocarbon group having from 2 to 36 carbon atoms, one or more carbon-carbon triple bonds (“C₂-C₃₆ alkynyl”). In some embodiments, an alkynyl group has 2 to 32 carbon atoms (“C₂-C₃₂ alkynyl”). In some embodiments, an alkynyl group has 2 to 24 carbon atoms (“C₂-C₂₄ alkynyl”).

[0043] In some embodiments, an alkynyl group has 2 to 18 carbon atoms (“C₂-C₁₈ alkynyl”). In some embodiments, an alkynyl group has 2 to 12 carbon atoms (“C₂-C₁₂ alkynyl”). In some embodiments, an alkynyl group has 2 to 8 carbon atoms (“C₂-C₈ alkynyl”). In some embodiments, an alkynyl group has 2 to 6 carbon atoms (“C₂-C₆ alkynyl”). In some embodiments, an alkynyl group has 2 to 5 carbon atoms (“C₂-C₅ alkynyl”). In some embodiments, an alkynyl group has 2 to 4 carbon atoms (“C₂-C₄ alkynyl”). In some embodiments, an alkynyl group has 2 to 3 carbon atoms (“C₂-C₃ alkynyl”). In some embodiments, an alkynyl group has 2 carbon atoms (“C₂ alkynyl”). The one or more carbon-carbon triple bonds can be internal (such as in 2-butynyl) or terminal (such as in 1-butynyl).

[0044] Examples of C₂-C₄ alkynyl groups include ethynyl (C₂), 1-propynyl (C₃), 2-propynyl (C₃), 1-butynyl (C₄), 2-butynyl (C₄), and the like. Each instance of an alkynyl group may be independently optionally substituted, i.e., unsubstituted (an “unsubstituted alkynyl”) or substituted (a “substituted alkynyl”) with one or more substituents e.g., for instance from 1 to 5 substituents, 1 to 3 substituents, or 1 substituent. In certain embodiments, the alkynyl group is unsubstituted C₂₋₁₀ alkynyl. In certain embodiments, the alkynyl group is substituted C₂₋₆ alkynyl.

[0045] As used herein, the terms “heteroalkyl,” “heteroalkenyl,” and “heteroalkynyl,” refer to a non-cyclic stable straight or branched alkyl, alkenyl, or alkynyl chains, or combinations thereof, including at least one carbon atom and at least one heteroatom selected from the group consisting of O, N, P, Si, and S, and wherein the nitrogen and sulfur atoms may optionally be oxidized, and the nitrogen heteroatom may optionally be quaternized. The heteroatom(s) O, N, P, S, and Si may be placed at any position of the heteroalkyl, heteroalkenyl, or heteroalkynyl group. Exemplary heteroalkyl, heteroalkenyl, and heteroalkynyl groups include, but are not limited to: —CH₂—CH₂—O—CH₃, —CH₂—CH₂—NH—CH₃, —CH₂—CH₂—N(CH₃)—CH₃, —CH₂—S—CH₂—CH₃, —CH₂—CH₂—S(O)—CH₃, —CH₂—CH₂—S(O)₂—CH₃, —CH═CHO—CH₃, —Si(CH₃)₃, —CH₂—CH₂—P(O)₂—CH₃, —CH₂—CH═N—OCH₃, —CH═CH—N(CH₃)—CH₃, —O—CH₃, and —O—CH₂—CH₃. Up to two or three heteroatoms may be consecutive, such as, for example, —CH₂—NH—OCH₃ and —CH₂—O—Si(CH₃)₃.

[0046] The terms “alkylene,” “alkenylene,” “alkynylene,” or “heteroalkylene,” alone or as part of another substituent, mean, unless otherwise stated, a divalent radical derived from an alkyl, alkenyl, alkynyl, or heteroalkyl, respectively. The term “alkenylene,” by itself or as part of another substituent, means, unless otherwise stated, a divalent radical derived from an alkene. An alkylene, alkenylene, alkynylene, or heteroalkylene group may be described as, e.g., a C₁-C₆-membered alkylene, C₁-C₆-membered alkenylene, C₁-C₆-membered alkynylene, or C₁-C₆-membered heteroalkylene, wherein the term “membered” refers to the non-hydrogen atoms within the moiety. In the case of heteroalkylene groups, heteroatoms can also occupy either or both of the chain termini (e.g., alkyleneoxy, alkylenedioxy, alkyleneamino, alkylenediamino, and the like). Still further, for alkylene and heteroalkylene linking groups, no orientation of the linking group is implied by the direction in which the formula of the linking group is written. For example, the formula —C(O)₂R′— may represent both —C(O)₂R′—and —R′C(O)₂—. Each instance of an alkylene, alkenylene, alkynylene, or heteroalkylene group may be independently optionally substituted, i.e., unsubstituted (an “unsubstituted alkylene”) or substituted (a “substituted heteroalkylene) with one or more substituents.

[0047] As used herein, “aryl” refers to a radical of a monocyclic or polycyclic (e.g., bicyclic or tricyclic) 4n+2 aromatic ring system (e.g., having 6, 10, or 14 π electrons shared in a cyclic array) having 6-14 ring carbon atoms and zero heteroatoms provided in the aromatic ring system (“C₆-C₁₄ aryl”). In some embodiments, an aryl group has six ring carbon atoms (“C₆ aryl”; e.g., phenyl). In some embodiments, an aryl group has ten ring carbon atoms (“C₁₀ aryl”; e.g., naphthyl such as 1-naphthyl and 2-naphthyl). In some embodiments, an aryl group has fourteen ring carbon atoms (“C₁₄ aryl”; e.g., anthracyl). An aryl group may be described as, e.g., a C₆-C₁₀-membered aryl, wherein the term “membered” refers to the non-hydrogen ring atoms within the moiety. Aryl groups include phenyl, naphthyl, indenyl, and tetrahydronaphthyl. Each instance of an aryl group may be independently optionally substituted, i.e., unsubstituted (an “unsubstituted aryl”) or substituted (a “substituted aryl”) with one or more substituents. In certain embodiments, the aryl group is unsubstituted C₆-C₁₄ aryl. In certain embodiments, the aryl group is substituted C₆-C₁₄ aryl.

[0048] As used herein, “cycloalkyl” refers to a radical of a non-aromatic cyclic hydrocarbon group having from 3 to 7 ring carbon atoms (“C₃-C₇ cycloalkyl”) and zero heteroatoms in the non-aromatic ring system. In some embodiments, a cycloalkyl group has 3 to 6 ring carbon atoms (“C₃-C₆ cycloalkyl”). In some embodiments, a cycloalkyl group has 5 to 7 ring carbon atoms (“C₅-C₇ cycloalkyl”). A cycloalkyl group may be described as, e.g., a C₄-C₇-membered cycloalkyl, wherein the term “membered” refers to the non-hydrogen ring atoms within the moiety. Exemplary C₃-C₆ cycloalkyl groups include, without limitation, cyclopropyl (C₃), cyclopropenyl (C₃), cyclobutyl (C₄), cyclobutenyl (C₄), cyclopentyl (C₅), cyclopentenyl (C₅), cyclohexyl (C₆), cyclohexenyl (C₆), cyclohexadienyl (C₆), and the like. Exemplary C₃-C₇ cycloalkyl groups include, without limitation, the aforementioned C₃-C₆ cycloalkyl groups as well as cycloheptyl (C₇), cycloheptenyl (C₇), cycloheptadienyl (C₇), and cycloheptatrienyl (C₇), bicyclo[2.1.1]hexanyl (C₆), bicyclo[3.1.1]heptanyl (C₇), and the like. As the foregoing examples illustrate, in certain embodiments, the cycloalkyl group is either monocyclic (“monocyclic cycloalkyl”) or contain a fused, bridged or spiro ring system such as a bicyclic system (“bicyclic cycloalkyl”) and can be saturated or can be partially unsaturated. “Cycloalkyl” also includes ring systems wherein the cycloalkyl ring, as defined above, is fused with one or more aryl groups wherein the point of attachment is on the cycloalkyl ring, and in such instances, the number of carbons continue to designate the number of carbons in the cycloalkyl ring system. Each instance of a cycloalkyl group may be independently optionally substituted, i.e., unsubstituted (an “unsubstituted cycloalkyl”) or substituted (a “substituted cycloalkyl”) with one or more substituents.

[0049] As used herein, the term “halo” refers to a fluorine, chlorine, bromine, or iodine radical (i.e., —F, —Cl, —Br, and —I, respectively).

[0050] As used herein, the term “heteroaryl,” refers to an aromatic heterocycle that comprises 1, 2, 3 or 4 heteroatoms selected, independently of the others, from nitrogen, sulfur and oxygen. As used herein, the term “heteroaryl” refers to a group that may be substituted or unsubstituted. A heteroaryl may be fused to one or two rings, such as a cycloalkyl, an aryl, or a heteroaryl ring. The point of attachment of a heteroaryl to a molecule may be on the heteroaryl, cycloalkyl, heterocycloalkyl or aryl ring, and the heteroaryl group may be attached through carbon or a heteroatom. A heteroaryl group can either be monocyclic (“monocyclic heteroaryl”) or a fused, bridged or spiro ring system such as a bicyclic system (“bicyclic heteroaryl”). Examples of heteroaryl groups include imidazolyl, furyl, pyrrolyl, thienyl, thiazolyl, isoxazolyl, isothiazolyl, thiadiazolyl, oxadiazolyl, pyridinyl, pyrimidyl, pyrazinyl, pyridazinyl, quinolyl, isoquinolinyl, indazolyl, benzoxazolyl, benzisooxazolyl, benzofuryl, benzothiazolyl, indolizinyl, imidazopyridinyl, pyrazolyl, triazolyl, oxazolyl, tetrazolyl, benzimidazolyl, benzoisothiazolyl, benzothiadiazolyl, benzoxadiazolyl, indolyl, tetrahydroindolyl, azaindolyl, imidazopyridyl, quinazolinyl, purinyl, pyrrolo[2,3]pyrimidyl, pyrazolo[3,4]pyrimidyl or benzo(b)thienyl, each of which can be optionally substituted.

[0051] As used herein, the term “heterocyclyl” refers to non-aromatic ring system having ring carbon atoms and 1 to 4 ring heteroatoms, wherein each heteroatom is independently selected from nitrogen, oxygen, sulfur, boron, phosphorus, and silicon. As used herein, the term “heterocyclyl” refers to a group that may be substituted or unsubstituted. In heterocyclyl groups that contain one or more nitrogen atoms, the point of attachment can be a carbon or nitrogen atom, as valency permits. A heterocyclyl group can either be monocyclic (“monocyclic heterocyclyl”) or a fused, bridged or spiro ring system such as a bicyclic system (“bicyclic heterocyclyl”), and can be saturated or can be partially unsaturated. Heterocyclyl bicyclic ring systems can include one or more heteroatoms in one or both rings. “Heterocyclyl” also includes ring systems wherein the heterocyclyl ring, as defined above, is fused with one or more cycloalkyl groups wherein the point of attachment is either on the cycloalkyl or heterocyclyl ring, or ring systems wherein the heterocyclyl ring, as defined above, is fused with one or more aryl or heteroaryl groups, wherein the point of attachment is on the heterocyclyl ring, and in such instances, the number of ring members continue to designate the number of ring members in the heterocyclyl ring system. In certain embodiments, the heterocyclyl group is unsubstituted 3-10 membered heterocyclyl. In certain embodiments, the heterocyclyl group is substituted 3-10 membered heterocyclyl.

[0052] As used herein, the term “hydroxy” refers to the radical —OH.

[0053] The term “nucleobase” as used herein, is a nitrogen-containing biological compounds found linked to a sugar within a nucleoside—the basic building blocks of deoxyribonucleic acid (DNA) and ribonucleic acid (RNA). The primary, or naturally occurring, nucleobases are cytosine (DNA and RNA), guanine (DNA and RNA), adenine (DNA and RNA), thymine (DNA) and uracil (RNA), abbreviated as C, G, A, T, and U, respectively. Because A, G, C, and T appear in the DNA, these molecules are called DNA-bases; A, G, C, and U are called RNA-bases. Adenine and guanine belong to the double-ringed class of molecules called purines (abbreviated as R). Cytosine, thymine, and uracil are all pyrimidines. Other nucleobases that do not function as normal parts of the genetic code, are termed non-naturally occurring. In an embodiment, a nucleobase may be chemically modified, for example, with an alkyl (e.g., methyl), halo, —O— alkyl, or other modification.

[0054] The term “oligonucleotide,” as used herein, refers to a polymer of nucleotide or nucleoside monomers (e.g., a polymer comprising more than 2, 3, 4, 5, 6, 7, 8, 9, 10, or more nucleotide or nucleoside monomers) more comprising of naturally occurring bases, sugars and internucleotide (backbone) linkages. The term “oligonucleotide” also includes polymers comprising non-naturally occurring monomers, or portions thereof, which function similarly. Such modified oligonucleotides may impart certain benefits often preferred over non-modified forms of the same oligonucleotide sequences, including enhanced cellular uptake and increased stability in the presence of nucleases.

[0055] As used herein, the definition of each expression, e.g., alkyl, m, n, etc., when it occurs more than once in any structure, is intended to be independent of its definition elsewhere in the same structure.

[0056] As described herein, compounds of the present disclosure may contain “optionally substituted” moieties. In general, the term “substituted”, whether preceded by the term “optionally” or not, means that one or more hydrogens of the designated moiety are replaced with a suitable substituent. Unless otherwise indicated, an “optionally substituted” group may have a suitable substituent at each substitutable position of the group, and when more than one position in any given structure may be substituted with more than one substituent selected from a specified group, the substituent may be either the same or different at each position. Combinations of substituents envisioned under this invention are preferably those that result in the formation of stable or chemically feasible compounds. The term “stable”, as used herein, refers to compounds that are not substantially altered when subjected to conditions to allow for their production, detection, and, in certain embodiments, their recovery, purification, and use for one or more of the purposes disclosed herein.

### Bifunctional Oligonucleotides

[0057] The present disclosure features bifunctional oligonucleotides comprising at least two domains, wherein each domain capable of binding to a different target. In an embodiment, the bifunctional oligonucleotide comprises: (i) an alternative splice site targeting sequence and (ii) a spliceosome targeting sequence. In an embodiment, the bifunctional oligonucleotide comprises (i). In an embodiment, the bifunctional oligonucleotide comprises (ii). In an embodiment, the bifunctional oligonucleotide comprises (i) and (ii). In an embodiment, the bifunctional oligonucleotide comprises: (i) a nucleotide sequence capable of binding to a target sequence comprising an alternative splice site (e.g., 5′ splice site), e.g., comprising between 5 and 35 nucleotides in length; and (ii) a nucleotide sequence capable of recruiting a spliceosome component, e.g., an U1 snRNP (e.g., U1 snRNA).

[0058] The bifunctional oligonucleotide may be single-stranded or double-stranded. In an embodiment, the bifunctional oligonucleotide is single-stranded. The bifunctional oligonucleotide may be a sense oligonucleotide or an antisense oligonucleotide. In an embodiment, the bifunctional oligonucleotide comprises a sense oligonucleotide. In an embodiment, the bifunctional oligonucleotide comprises an antisense oligonucleotide. In an embodiment, bifunctional oligonucleotide comprises a single-stranded sense oligonucleotide. In an embodiment, bifunctional oligonucleotide comprises a single-stranded antisense oligonucleotide.

[0059] The bifunctional oligonucleotide may be anywhere from 10 to 100 nucleotides in length. For example, the bifunctional oligonucleotide may be between 25 and 75 nucleotides in length (e.g, between 25 and 70 nucleotides, between 30 and 65 nucleotides, between 40 and 60 nucleotides). In an embodiment, the bifunctional oligonucleotide comprises an alternative splice site targeting sequence greater than 5, 10, 15, 20, 25, 30, 35, or 40 nucleotides in length. In an embodiment, the bifunctional oligonucleotide comprises an alternative splice site targeting sequence between 5 and 35 nucleotides in length (e.g., between 6 and 35, 7 and 35, 8 and 35, 9 and 35, 10 and 35, 11 and 35, 12 and 35, 13 and 35, 14 and 35, 15 and 35, 16 and 35, 17 and 35, 18 and 35, 19 and 35, 20 and 35,21 and 35,22 and 35,23 and 35,24 and 35, or 25 and 35 nucleotides in length). In an embodiment, the bifunctional oligonucleotide comprises a spliceosome targeting sequence greater than 5, 10, 15, 20, 25, 30, 35, or 40 nucleotides in length.

[0060] In an embodiment, the bifunctional oligonucleotide comprises a spliceosome targeting sequence between 5 and 35 nucleotides in length (e.g., between 6 and 35, 7 and 35, 8 and 35, 9 and 35, 10 and 35, 11 and 35, 12 and 35, 13 and 35, 14 and 35, 15 and 35, 16 and 35, 17 and 35, 18 and 35, 19 and 35, 20 and 35, 21 and 35, 22 and 35, 23 and 35, 24 and 35, or 25 and 35 nucleotides in length). In an embodiment, the bifunctional comprises an alternative splice site targeting sequence between 5 and 35 nucleotides in length and a spliceosome targeting sequence between 5 and 35 nucleotides in length.

[0061] In an embodiment, the alternative splice site targeting sequence within the bifunctional oligonucleotide is 5′ to the spliceosome targeting sequence. In an embodiment, the alternative splice site targeting sequence within the bifunctional oligonucleotide is 3′ to the spliceosome targeting sequence. In an embodiment, the bifunctional oligonucleotide comprises a plurality of alternative splice site targeting sequences. In an embodiment, the bifunctional oligonucleotide comprises a plurality of spliceosome targeting sequences.

[0062] In an embodiment, the bifunctional oligonucleotide comprises an oligonucleotide of Formula (I):

[chemical structure]

or a pharmaceutically acceptable salt thereof, wherein the alternative splice site targeting sequence is capable of binding to a target sequence (e.g., an RNA, e.g., a pre-mRNA or mRNA) comprising an exonic element, such as an alternative splice site; the spliceosome targeting sequence is capable of binding to a spliceosome component (e.g., U1 snRNP), and L is absent or a linker.

[0063] In an embodiment, the bifunctional nucleotide of Formula (I) is a bifunctional nucleotide of Formula (I-a):

[chemical structure]

or a pharmaceutically acceptable salt thereof, wherein the alternative splice site targeting sequence is a sequence selected from AAAAGCAGAACCUGAGCGGC, UUCCAGGGUCGCCATGGCGG, UCAGCUTUUCCAGGGUCGCC, AAGGACTUGAGGGACUCGAA, and AAGGACTUGAGGGACUCGAA; each of bases 1-33 may be optionally modified with one or modifications selected from a 2′OMe modification, a locked nucleic acid modification, a 2′-O-methoxy ethyl modification, and phosphorothioate modification; and L is absent or a linker.

[0064] In an embodiment, the bifunctional nucleotide of Formula (I) is a bifunctional nucleotide of Formula (I-b):

[chemical structure]

or a pharmaceutically acceptable salt thereof, wherein the alternative splice site targeting sequence is a sequence selected from AAAAGCAGAACCUGAGCGGC, UUCCAGGGUCGCCATGGCGG, UCAGCUTUUCCAGGGUCGCC, AAGGACTUGAGGGACUCGAA, and AAGGACTUGAGGGACUCGAA; and each of bases 1-33 may be optionally modified with one or modifications selected from a 2′OMe modification, a locked nucleic acid modification, a 2′-O-methoxy ethyl modification, and a phosphorothioate modification.

[0065] In an embodiment, the bifunctional nucleotide of Formula (I) is a bifunctional nucleotide of Formula (I-c):

[chemical structure]

or a pharmaceutically acceptable salt thereof, wherein each of the bases from 1-33 may be optionally modified with one or modifications selected from: 2′OMe modification, locked nucleic acid modification, a 2′-O-methoxy ethyl modification, and phosphorothioate modification.

[0066] In an embodiment, the bifunctional nucleotide of Formula (I) is a bifunctional nucleotide of Formula (1-d):

[chemical structure]

or a pharmaceutically acceptable salt thereof, wherein each of the bases from 1-33 may be optionally modified with one or modifications selected from: 2′OMe modification, locked nucleic acid modification, a 2′-O-methoxy ethyl modification, and phosphorothioate modification.

[0067] In an embodiment, the bifunctional nucleotide of Formula (I) is a bifunctional nucleotide of Formula (I-e):

[chemical structure]

or a pharmaceutically acceptable salt thereof, wherein each of the bases from 1-33 may be optionally modified with one or modifications selected from: 2′OMe modification, locked nucleic acid modification, a 2′-O-methoxy ethyl modification, and phosphorothioate modification.

[0068] In an embodiment, the bifunctional nucleotide of Formula (I) is a bifunctional nucleotide of Formula (I-f):

[chemical structure]

or a pharmaceutically acceptable salt thereof, wherein each of the bases from 1-33 may be optionally modified with one or modifications selected from: 2′OMe modification, locked nucleic acid modification, a 2′-O-methoxy ethyl modification, and phosphorothioate modification.

[0069] In an embodiment, the bifunctional nucleotide of Formula (I) is a bifunctional nucleotide of Formula (I-g):

[chemical structure]

or a pharmaceutically acceptable salt thereof, wherein each of the bases from 1-33 may be optionally modified with one or modifications selected from: 2′OMe modification, locked nucleic acid modification, a 2′-O-methoxy ethyl modification, and phosphorothioate modification.

[0070] In an embodiment, the bifunctional oligonucleotide comprises an oligonucleotide of Formula (II):

[chemical structure]

or a pharmaceutically acceptable salt thereof, wherein the alternative splice site targeting sequence is capable of binding to a target sequence (e.g., an RNA, e.g., a pre-mRNA or mRNA) comprising an exonic element, such as an alternative splice site; the spliceosome targeting sequence is capable of binding to a spliceosome component (e.g., U1 snRNP), and L is absent or a linker.

[0071] In an embodiment, the bifunctional nucleotide of Formula (II) is a bifunctional nucleotide of Formula (II-a):

[chemical structure]

or a pharmaceutically acceptable salt thereof, wherein the alternative splice site targeting sequence is a sequence selected from: AAAAGCAGAACCUGAGCGGC, UUCCAGGGUCGCCATGGCGG, UCAGCUTUUCCAGGGUCGCC, AAGGACTUGAGGGACUCGAA, and AAGGACTUGAGGGACUCGAA; each of bases 1-33 may be optionally modified with one or modifications selected from: 2′OMe modification, locked nucleic acid modification, a 2′-O-methoxy ethyl modification, and phosphorothioate modification; and L is absent or a linker.

[0072] A bifunctional oligonucleotide described herein may comprise a chemical modification, such as a non-naturally occurring chemical modification or a naturally occurring chemical modification). The chemical modification may be present at any location on the bifunctional oligonucleotide, including on a nucleotide or at one or both termini of the bifunctional oligonucleotide. In an embodiment, the chemical modification comprises a sugar modification, a nucleobase modification, a terminal modification, or an internucleotide linkage modification. In an embodiment, the chemical modification comprises a sugar modification (e.g, a 2′-ribose modification). Exemplary sugar modifications include a 2′-O-alkyl modification, a 2′-halo modification, or a 2′-deoxy modification (e.g., a 2′-OMe, 2′-OEt, 2′-MOE, 2′-H, 2′-Cl, or 2′-F modification). In an embodiment, the sugar modification comprises a 2′-OMe modification. In an embodiment, the sugar modification comprises a 2′-OMe modification. In an embodiment, the sugar modification comprises a 2′-OEt modification. In an embodiment, the sugar modification comprises a 2′-MOE modification. In an embodiment, the sugar modification comprises a 2′-H modification. In an embodiment, the sugar modification comprises a 2′-Cl modification. In an embodiment, the sugar modification comprises a 2′-F modification. In an embodiment, the chemical modification is a locked nucleic acid (LNA). The term “locked nucleic acid” refers to a modification which the 2′-OH on the nucleotide sugar is connected by an alkylene (e.g., methylene) bridge to the 4′ carbon of the same nucleotide sugar.

[0073] The bifunctional oligonucleotide can include modification of all or some of the sugar moieties of the nucleic acid. For example, the 2′ hydroxyl group (OH) of one or more sugar moieties within the bifunctional oligonucleotide sequence can be modified or replaced with a number of different “oxy” or “deoxy” substituents. Examples of “oxy”-2′ hydroxyl group modifications include alkoxy or aryloxy (OR, e.g., R═H, alkyl, cycloalkyl, aryl, aralkyl, heteroaryl or sugar); polyethyleneglycols (PEG), O(CH₂CH₂O)ₙCH₂CH₂OR; O—R′ (R′═NH₂, alkylamino, dialkylamino, heterocyclyl, arylamino, diaryl amino, heteroaryl amino, diheteroaryl amino, ethylene diamine, polyamino or aminoalkoxy) and O(CH₂)ₙR′, (e.g., R′═NH₂, alkylamino, dialkylamino, heterocyclyl, arylamino, diaryl amino, heteroaryl amino, or diheteroaryl amino, ethylene diamine, polyamino or aminoalkoxy).

[0074] Additional sugar modifications include amino (e.g. NH2; alkylamino, dialkylamino, heterocyclyl, arylamino, diaryl amino, heteroaryl amino, diheteroaryl amino, or amino acid); NH(CH₂CH₂NH)ₙCH₂CH₂-AMINE (AMINE=NH₂, alkylamino, dialkylamino, heterocyclyl, arylamino, diaryl amino, heteroaryl amino, or diheteroaryl amino), NHC(O)R (R=alkyl, cycloalkyl, aryl, aralkyl, heteroaryl or sugar); cyano; mercapto; alkyl-thio-alkyl; thioalkoxy; alkyl; cycloalkyl; aryl; alkenyl and alkynyl, which may be optionally substituted with e.g., an amino functionality.

[0075] The sugar group can also contain one or more carbons that possess the opposite stereochemical configuration than that of the corresponding carbon in ribose. Thus, an oligonucleotide can include nucleotides containing e.g., arabinose, as the sugar. The monomer can have an alpha linkage at the 1′ position on the sugar, e.g., alpha-nucleosides. Bifunctional oligonucleotides described herein can also include “abasic” sugars, which lack a nucleobase at C-1′. These abasic sugars can also be further containing modifications at one or more of the constituent sugar atoms. Bifunctional oligonucleotides described herein can also contain one or more sugars that are in the L form, e.g. L-nucleosides. One or more nucleotides of a bifunctional oligonucleotide may have L-sugar with modifications in place of the modified nucleoside in its entity pursuant to the invention described. The L-sugar may have the same sugar and base modification or combinations thereof as in D-sugar. One or more nucleotides of an bifunctional oligonucleotide having the L-sugar may have a 2′-5′ linkage or inverted linkages, e.g. 3′-3′, 5′-5′, 2′-2′ or 2′-3′ linkages. These linkages can be placed between two L-sugar moieties, between L- and D-sugars or between two D-sugars in an oligonucleotide bearing a modified L-nucleoside Modification to the sugar group may also include replacement of the 4′-0 with a sulfur, nitrogen or CH₂ group.

[0076] In addition, one or more nucleotides of a bifunctional oligonucleotide may contain an L-sugar with modifications in place of the modified nucleoside. The L-sugar has the same sugar and base modification or combinations thereof as in D-sugar. One or more nucleotides of a bifunctional oligonucleotide having the L-sugar may have a 2′-5′ linkage or inverted linkages, e.g. 3′-3′, 5′-5′, 2′-2′ or 2′-3′ linkages. These linkages can be placed between two L-sugar moieties, between L- and D-sugars or between two D-sugars in an oligonucleotide bearing a modified L-nucleoside. The 3′ and 5′ ends of an oligonucleotide can be modified. Such modifications can be at the 3′ end, 5′ end or both ends of the molecule. They can include modification or replacement of an entire terminal phosphate or of one or more of the atoms of the phosphate group. For example, the 3′ and 5′ ends of a bifunctional oligonucleotide can be conjugated to other functional molecular entities such as labeling moieties, e.g., fluorophores (e.g., pyrene, TAMRA, fluorescein, Cy3 or Cy5 dyes) or protecting groups (for example, comprising a sulfur atom, silicon atom, boron atom, or other moiety, including an acyl or ester). The functional molecular entities can be attached to the sugar through a phosphate group and/or a linker. The terminal atom of the linker can connect to or replace the linking atom of the phosphate group or the C-3′ or C-5′ O, N, S or C group of the sugar.

[0077] In an embodiment, the chemical comprises a nucleobase modification (e.g., methylation).

[0078] In an embodiment, the chemical modification comprises an internucleotide linkage modification (e.g., a phosphorothioate modification). In an embodiment, a bifunctional oligonucleotide comprises internucletside linkages selected from phosphorus and non-phosphorus containing internucleotide. In one example, the phosphorus containing internucleotide includes, but not limited to, phosphodiester, phosphorothioates, chiral phosphorothioates, phosphorodithioates, phosphotriesters, aminoalkylphosphotriesters, methyl and other alkyl phosphonates including 3′-alkylene phosphonates, 5′-alkylene phosphonates and chiral phosphonates, phosphinates, phosphoramidates including 3′-amino phosphoramidate and aminoalkylphosphoramidates, thionophosphoramidates, thionoalkylphosphonates, thionoalkylphosphotriesters, selenophosphates and boranophosphates having normal 3′-5′ linkages, 2′-5′ linked analogs of these, and those having inverted polarity where one or more internucleotide linkages is a 3′ to 3′, 5′ to 5′ or 2′ to 2′ linkage. A bifunctional oligonucleotide described herein may have inverted polarity and can comprise a single 3′ to 3′ linkage at the 3′-most inter-nucleotide linkage i.e. a single inverted nucleoside residue which may be abasic (the nucleobase is missing or has a hydroxyl group in place thereof). Various salts, mixed salts and free acid forms are also included. Representative U.S. patents that describe the preparation of the above phosphorus-containing linkages include U.S. Pat. Nos. 5,194,599; 5,565,555; 5,527,899; 5,721,218; 5,672,697 and 5,625,050, each of which is herein incorporated by reference.

[0079] Additional chemical modifications that may be present on a bifunctional oligonucleotide describe herein include 7-deaza-adenosine, N1-methyl-adenosine, N6, N6 (dimethyl)adenine, N6-cis-hydroxy-isopentenyl-adenosine, thio-adenosine, 2-(amino)adenine, 2-(aminopropyl)adenine, 2-(methylthio) N6 (isopentenyl)adenine, 2-(alkyl)adenine, 2-(aminoalkyl)adenine, 2-(aminopropyl)adenine, 2-(halo)adenine, 2-(propyl)adenine, 2′-azido-2′-deoxy-adenosine, 2′-Deoxy-2′-alpha-aminoadenosine, 2′-deoxy-2′-alpha-azidoadenosine, 6-(alkyl)adenine, 6-(methyl)adenine, 6-(alkyl)adenine, 6-(methyl)adenine, 7-(deaza)adenine, 8-(alkenyl)adenine, 8-(alkynyl)adenine, 8-(amino)adenine, 8-(thioalkyl)adenine, 8-(alkenyl)adenine, 8-(alkyl)adenine, 8-(alkynyl)adenine, 8-(amino)adenine, 8-(halo)adenine, 8-(hydroxyl)adenine, 8-(thioalkyl)-adenine, 8-(thiol)adenine, 8-azido-adenosine, azaadenine, deazaadenine, N6-(methyl)adenine, N6-(isopentyl)adenine, 7-deaza-8-aza-adenosine, 7-methyladenine, 1-deazaadenosine, 2′-Fluoro-N6-Bz-deoxyadenosine, 2′-OMe-2-amino-adenosine, 2′O-methyl-N6-Bz-deoxyadenosine, 2′-alpha-ethynyladenosine, 2-aminoadenine, 2-Aminoadenosine, 2-Amino-adenosine, 2′-alpha-trifluoromethyladenosine, 2-azidoadenosine, 2′-beta-ethynyladenosine, 2-Bromoadenosine, 2′-beta-Trifluoromethyladenosine, 2-Chloroadenosine, 2′-Deoxy-2′,2′-difluoroadenosine, 2′-Deoxy-2′-alpha-mercaptoadenosine, 2′-Deoxy-2′-alpha-thiomethoxyadenosine, 2′-Deoxy-2′-beta-aminoadenosine, 2′-Deoxy-2′-beta-azidoadenosine, 2′-Deoxy-2′-beta-bromoadenosine, 2′-Deoxy-2′-beta-chloroadenosine, 2′-Deoxy-2′-beta-fluoroadenosine, 2′-Deoxy-2′-beta-iodoadenosine, 2′-Deoxy-2′-beta-mercaptoadenosine, 2′-Deoxy-2′-beta-thiomethoxyadenosine, 2-Fluoroadenosine, 2-Iodoadenosine, 2-Mercaptoadenosine, 2-methoxy-adenine, 2-methylthio-adenine, 2-Trifluoromethyladenosine, 3-Deaza-3-bromoadenosine, 3-Deaza-3-chloroadenosine, 3-Deaza-3-fluoroadenosine, 3-Deaza-3-iodoadenosine, 3-Deazaadenosine, 4′-Azidoadenosine, 4′-Carbocyclic adenosine, 4′-Ethynyladenosine, 5′-Homo-adenosine, 8-Aza-adenosine, 8-bromo-adenosine, 8-Trifluoromethyladenosine, 9-Deazaadenosine, 2-aminopurine, 7-deaza-2,6-diaminopurine, 7-deaza-8-aza-2,6-diaminopurine, 7-deaza-8-aza-2-aminopurine, 2,6-diaminopurine, 7-deaza-8-aza-adenine, 7-deaza-2-aminopurine, 4-methylcytidine, 5-aza-cytidine, Pseudo-iso-cytidine, pyrrolo-cytidine, alpha-thio-cytidine, 2-(thio)cytosine, 2′-Amino-2′-deoxy-cytosine, 2′-Azido-2′-deoxy-cytosine, 2′-Deoxy-2′-alpha-aminocytidine, 2′-Deoxy-2′-alpha-azidocytidine, 3 (deaza) 5 (aza)cytosine, 3 (methyl)cytosine, 3-(alkyl)cytosine, 3-(deaza) 5 (aza)cytosine, 3-(methyl)cytidine, 4,2′-O-dimethylcytidine, 5 (halo)cytosine, 5 (methyl)cytosine, 5 (propynyl)cytosine, 5 (trifluoromethyl)cytosine, 5-(alkyl)cytosine, 5-(alkynyl)cytosine, 5-(halo)cytosine, 5-(propynyl)cytosine, 5-(trifluoromethyl)cytosine, 5-bromo-cytidine, 5-iodo-cytidine, 5-propynyl cytosine, 6-(azo)cytosine, 6-aza-cytidine, aza cytosine, deaza cytosine, N4 (acetyl)cytosine, 1-methyl-1-deaza-pseudoisocytidine, 1-methyl-pseudoisocytidine, 2-methoxy-5-methyl-cytidine, 2-methoxy-cytidine, 2-thio-5-methyl-cytidine, 4-methoxy-1-methyl-pseudoisocytidine, 4-methoxy-pseudoisocytidine, 4-thio-1-methyl-1-deaza-, pseudoisocytidine, 4-thio-1-methyl-pseudoisocytidine, 4-thio-pseudoisocytidine, 5-aza-zebularine, 5-methyl-zebularine, pyrrolo-pseudoisocytidine, zebularine, (E)-5-(2-Bromo-vinyl)cytidine, 2,2′-anhydro-cytidine, 2′-Fluor-N4-Bz-cytidine, 2′-Fluoro-N4-Acetyl-cytidine, 2′-O-Methyl-N4-Acetyl-cytidine, 2′-O-methyl-N4-Bz-cytidine, 2′-a-Ethynylcytidine, 2′-a-Trifluoromethylcytidine, 2′-b-Ethynylcytidine, 2′-b-Trifluoromethylcytidine, 2′-Deoxy-2′,2′-difluorocytidine, 2′-Deoxy-2′-alpha-mercaptocytidine, 2′-Deoxy-2′-alpha-thiomethoxycytidine, 2′-Deoxy-2′-betab-aminocytidine, 2′-Deoxy-2′-beta-azidocytidine, 2′-Deoxy-2′-beta-bromocytidine, 2′-Deoxy-2′-beta-chlorocytidine, 2′-Deoxy-2′-beta-fluorocytidine, 2′-Deoxy-2′-beta-iodocytidine, 2′-Deoxy-2′-beta-mercaptocytidine, 2′-Deoxy-2′-beta-thiomethoxycytidine TP, 2′-O-Methyl-5-(1-propynyl)cytidine, 3′-Ethynylcytidine, 4′-Azidocytidine, 4′-Carbocyclic cytidine, 4′-Ethynylcytidine, 5-(1-Propynyl)ara-cytidine, 5-(2-Chloro-phenyl)-2-thiocytidine, 5-(4-Amino-phenyl)-2-thiocytidine, 5-Aminoallyl-cytosine, 5-Cyanocytidine, 5-Ethynylara-cytidine, 5-Ethynylcytidine, 5′-Homo-cytidine, 5-Methoxycytidine, 5-Trifluoromethyl-Cytidine, N4-Amino-cytidine, N4-Benzoyl-cytidine, pseudoisocytidine, 6-thio-guanosine, 7-deaza-guanosine, 8-oxo-guanosine, Ni-methyl-guanosine, alpha-thio-guanosine, 2-(propyl)guanine, 2-(alky1)guanine, 2′-Amino-2′-deoxy-guanosine, 2′-Azido-2′-deoxy-guanosine, 2′-Deoxy-2′-alpha-aminoguanosine, 2′-Deoxy-2′-alpha-azidoguanosine, 6-(methyl)guanine, 6-(alky1)guanine, 6-(methyl)guanine, 6-methyl-guanosine, 7-(alkyl)guanine, 7-(deaza)guanine, 7-(methyl)guanine, 7-(alkyl)guanine, 7-(deaza)guanine, 7-(methyl)guanine, 8-(alkyl)guanine, 8-(alkynyl)guanine, 8-(halo)guanine, 8-(thioalkyl)guanine, 8-(alkenyl)guanine, 8-(alkyl)guanine, 8-(alkynyl)guanine, 8-(amino)guanine, 8-(halo)guanine, 8-(hydroxyl)guanine, 8-(thioalkyl)guanine, 8-(thiol)guanine, azaguanine, deaza guanine, N(methyl)guanine, N-(methyl)guanine, 1-methyl-6-thio-guanosine, 6-methoxy-guanosine, 6-thio-7-deaza-8-aza-guanosine, 6-thio-7-deaza-guanosine, 6-thio-7-methyl-guanosine, 7-deaza-8-aza-guanosine, 7-methyl-8-oxo-guanosine, N2,N2-dimethyl-6-thio-guanosine, N2-methyl-6-thio-guanosine, 1-Me-guanosine, 2′Fluoro-N2-isobutyl-guanosine, 2′O-methyl-N2-isobutyl-guanosine, 2′-alpha-Ethynylguanosine, 2′-alpha-Trifluoromethyl-guanosine, 2′-beta-Ethynylguanosine, 2′-beta-Trifluoromethylguanosine, 2′-Deoxy-2′,2′-difluoroguanosine, 2′-Deoxy-2′-alpha-mercaptoguanosine, 2′-Deoxy-2′-alpha-thiomethoxyguanosine, 2′-Deoxy-2′-beta-aminoguanosine, 2′-Deoxy-2′-beta-azidoguanosine, 2′-Deoxy-2′-beta-bromoguanosine, 2′-Deoxy-2′-beta-chloroguanosine, 2′-Deoxy-2′-beta-fluoroguanosine, 2′-Deoxy-2′-beta-iodoguanosine, 2′-Deoxy-2′-beta-mercaptoguanosine, 2′-Deoxy-2′-beta-thiomethoxyguanosine, 4′-Azidoguanosine, 4′-Carbocyclic guanosine, 4′-Ethynylguanosine, 5′-Homo-guanosine, 8-bromo-guanosine, 9-Deazaguanosine, N2-isobutyl-guanosine, 7-methylinosine, allyamino-thymidine, aza thymidine, deaza thymidine, deoxy-thymidine, 5-propynyl uracil, alpha-thio-uridine, 1-(aminoalkylamino-carbonylethylenyl)-2(thio)-pseudouracil, 1-(aminoalkylaminocarbonylethylenyl)-2,4-(dithio)pseudouracil, 1-(aminoalkylaminocarbonylethylenyl)-4 (thio)pseudouracil, 1-(aminoalkylamino-carbonylethylenyl)-pseudouracil, 1-(aminocarbonylethylenyl)-2(thio)-, pseudouracil, 1-(aminocarbonylethylenyl)-2,4-, (dithio)pseudouracil, 1-(aminocarbonylethylenyl)-4 (thio)pseudouracil, 1-(aminocarbonylethylenyl)-pseudouracil, 1-substituted 2-(thio)-pseudouracil, 1-substituted 2,4-(dithio)pseudouracil, 1-substituted 4 (thio)pseudouracil, 1-substituted pseudouracil, 1-(aminoalkylamino-carbonylethylenyl)-2-(thio)-pseudouracil, 1-Methyl-3-(3-amino-3-carboxypropyl) pseudouridine, l-Methyl-3-(3-amino-3-carboxyproovl)pseudo-Uradine, 1-Methyl-pseudo-UTP, 2 (thio)pseudouracil, 2′ deoxy uridine, 2′ fluorouridine, 2-(thio)uracil, 2,4-(dithio)psuedouracil, 2′-methyl, 2′-amino, 2′azido, 2′fluro-, guanosine, 2′-Amino-2′-deoxy-uridine, 2′-Azido-2′-deoxy-uridine, 2′-Azido-deoxyuridine, 2′-O-methylpseudouridine, 2′ deoxyuridine, 2′ fluorouridine, 2′-Deoxy-2′-alpha-aminouridine TP, 2′-Deoxy-2′-alpha-azidouridine TP, 2-methylpseudouridine, 3-(3 amino-3-carboxypropyl)uracil, 4-(thio)pseudouracil, 4-(thio)pseudouracil, 4-(thio)uracil, 4-thiouracil, 5-(1,3-diazole-1-alkyl)uracil, 5-(2-aminopropyl)uracil, 5-(aminoalkyl)uracil, 5-(dimethylaminoalkyl)uracil, 5-(guanidiniumalkyl)uracil, 5-(methoxycarbonylmethyl)-2-(thio)uracil, 5-(methoxycarbonyl-methyl)uracil, 5-(methyl)-2-(thio)uracil, 5-(methyl)-2,4-(dithio)uracil, 5 (methyl) 4 (thio)uracil, 5 (methylaminomethyl)-2 (thio)uracil, 5 (methylaminomethyl)-2,4 (dithio)uracil, 5 (methylaminomethyl)-4 (thio)uracil, 5 (propynyl)uracil, 5 (trifluoromethyl)uracil, 5-(2-aminopropyl)uracil, 5-(alky1)-2-(thio)pseudouracil, 5-(alkyl)-2,4 (dithio)pseudouracil, 5-(alky1)-4 (thio)pseudouracil, 5-(alkyl)pseudouracil, 5-(alkyl)uracil, 5-(alkynyl)uracil, 5-(allylamino)uracil, 5-(cyanoalkyl)uracil, 5-(dialkylaminoalkyl)uracil, 5-(dimethylaminoalkyl)uracil, 5-(guanidiniumalkyl)uracil, 5-(halo)uracil, 5-(1,3-diazole-1-alkyl)uracil, 5-(methoxy)uracil, 5-(methoxycarbonylmethyl)-2-(thio)uracil, 5-(methoxycarbonyl-methyl)uracil, 5-(methyl) 2(thio)uracil, 5-(methyl) 2,4 (dithio)uracil, 5-(methyl) 4 (thio)uracil, 5-(methyl)-2-(thio)pseudouracil, 5-(methyl)-2,4 (dithio)pseudouracil, 5-(methyl)-4 (thio)pseudouracil, 5-(methyl)pseudouracil, 5-(methylaminomethyl)-2 (thio)uracil, 5-(methylaminomethyl)-2,4(dithio)uracil, 5-(methylaminomethyl)-4-(thio)uracil, 5-(propynyl)uracil, 5-(trifluoromethyl)uracil, 5-aminoallyl-uridine, 5-bromo-uridine, 5-iodo-uridine, 5-uracil, 6 (azo)uracil, 6-(azo)uracil, 6-aza-uridine, allyamino-uracil, aza uracil, deaza uracil, N3 (methyl)uracil, Pseudo-uridine-1-2-ethanoic acid, pseudouracil, 4-Thio-pseudouridine, 1-carboxymethyl-pseudouridine, 1-methyl-1-deaza-pseudouridine, 1-propynyl-uridine, 1-taurinomethyl-1-methyl-uridine, l-taurinomethyl-4-thio-uridine, 1-taurinomethyl-pseudouridine, 2-methoxy-4-thio-pseudouridine, 2-thio-1-methyl-1-deaza-pseudouridine, 2-thio-1-methyl-pseudouridine, 2-thio-5-aza-uridine, 2-thio-dihydropseudouridine, 2-thio-dihydrouridine, 2-thio-pseudouridine, 4-methoxy-2-thio-pseudouridine, 4-methoxy-pseudouridine, 4-thio-1-methyl-pseudouridine, 4-thio-pseudouridine, 5-aza-uridine, dihydropseudouridine, (±)₁-(2-Hydroxypropyl)pseudouridine, (2R)-1-(2-Hydroxypropyl)pseudouridine, (2S)-1-(2-Hydroxypropyl)pseudouridine, (E)-5-(2-Bromo-vinyl)ara-uridine, (E)-5-(2-Bromo-vinyl)uridine, (Z)-5-(2-Bromo-vinyl)ara-uridine, (Z)-5-(2-Bromo-vinyl)uridine, 1-(2,2,2-Trifluoroethyl)-pseudouridine, 1-(2,2,3,3,3-, Pentafluoropropyl)pseudouridine, 1-(2,2-Diethoxyethy 1)pseudouridine, 1-(2,4,6-Trimethylbenzyl)pseudouridine, 1-(2,4,6-Trimethyl-benzyl)pseudo-uridine, 1-(2,4,6-Trimethyl-phenyl)pseudo-uridine, 1-(2-Amino-2-carboxyethyl)pseudo-uridine, 1-(2-Amino-ethyl)pseudouridine, 1-(2-Hydroxyethyl)pseudouridine, 1-(2-Methoxyethyl)pseudouridine, 1-(3,4-Bis-, trifluoromethoxybenzvl)pseudouridine, 1-(3,4-Dimethoxybenzyl)pseudouridine, 1-(3-Amino-3-carboxypropyl)pseudo-uridine, 1-(3-Amino-propyl)pseudouridine, 1-(3-Cyclopropyl-prop-2-ynyl)pseudouridine TP, 1-(4-Amino-4-carboxybutyl)pseudouridine, 1-(4-Amino-benzyl)pseudouridine, 1-(4-Amino-buty 1)pseudouridine, 1-(4-Amino-phenyl)pseudouridine, 1-(4-Azidobenzyl)pseudouridine, 1-(4-Bromobenzyl)pseudouridine, 1-(4-Chlorobenzyl)pseudouridine, 1-(4-Fluorobenzyl)pseudouridin, 1-(4-Iodobenzyl)pseudouridine, 1-(4-, Methanesulfonvlbenzvl)pseudouridine, 1-(4-Methoxybenzy 1)pseudouridine, 1-(4-Methoxy-benzyl)pseudouridine, 1-(4-Methoxy-phenyl)pseudouridine, 1-(4-Methylbenzyl)pseudouridine, 1-(4-Methyl-benzyl)pseudouridine, 1-(4-Nitrobenzyl)pseudouridine, 1-(4-Nitro-benzy!)pseudouridine, 1(4-Nitro-phenyl)pseudouridine, 1-(4-Thiomethoxybenzyl)pseudouridine, 1-(4-, Trifluoromethoxybenzvl)pseudouridine, 1-(4-Trifluoromethylbenzyl)pseudouridine, 1-(5-Amino-pentyl)pseudouridine, 1-(6-Amino-hexyl)pseudouridine, 1,6-Dimethyl-pseudouridine, 1-[3-(2-{2-[2-(2-Aminoethoxy)-ethoxy]-ethoxy}-ethoxy)-propionyl]pseudouridine, 1-{3-[2-(2-Aminoethoxy)-ethoxy]-propionvl}pseudouridine, 1-Acetylpseudouridine, 1-Alkyl-6-(1-propynyl)-pseudo-uridine, 1-Alkyl-6-(2-propynyl)-pseudo-uridine, 1-Alkyl-6-allyl-pseudo-uridine, 1-Alkyl-6-ethynyl-pseudo-uridine, 1-Alkyl-6-homoallyl-pseudo-uridine, 1-Alkyl-6-vinyl-pseudo-uridine, 1-Allylpseudouridine, 1-Aminomethyl-pseudo-uridine, 1-Benzoylpseudouridine, 1-Benzyloxymethylpseudouridine, 1-Benzyl-pseudo-uridine, 1-Biotinyl-PEG2-pseudouridine, 1-Biotinylpseudouridine, 1-Butyl-pseudo-uridine, 1-Cyanomethylpseudouridine, 1-Cyclobutylmethyl-pseudo-uridine, 1-Cyclobutyl-pseudo-uridine, 1-Cycloheptylmethyl-pseudo-uridine, 1-Cycloheptyl-pseudo-uridine, 1-Cyclohexylmethyl-pseudo-uridine, 1-Cyclohexyl-pseudo-uridine, 1-Cyclooctylmethyl-pseudo-uridine, 1-Cyclooctyl-pseudo-uridine, 1-Cyclopentylmethyl-pseudo-uridine, 1-Cyclopentyl-pseudo-uridine, 1-Cyclopropylmethyl-pseudo-uridine, 1-Cyclopropyl-pseudo-uridine, 1-Ethyl-pseudo-uridine, 1-Hexyl-pseudo-uridine, 1-Homoallylpseudouridine, 1-Hydroxymethylpseudouridine, 1-iso-propyl-pseudo-uridine, 1-Me-2-thio-pseudo-uridine, 1-Me-4-thio-pseudo-uridine, 1-Me-alpha-thio-pseudo-uridine, 1-Methanesulfonylmethylpseudouridine, 1-Methoxymethylpseudouridine uridine, 1-Methyl-6-(2,2,2-Trifluoroethyl)pseudo-uridine, l-Methyl-6-(4-morpholino)-pseudo-uridine, 1-Methyl-6-(4-thiomorpholino)-pseudo-uridine, l-Methyl-6-(substituted phenyl)pseudo-uridine, 1-Methyl-6-amino-pseudo-uridine, 1-Methyl-6-azido-pseudo-uridine, 1-Methyl-6-bromo-pseudo-uridine, 1-Methyl-6-butyl-pseudo-uridine, 1-Methyl-6-chloro-pseudo-uridine, 1-Methyl-6-cyano-pseudo-uridine, 1-Methyl-6-dimethylamino-pseudo-uridine, 1-Methyl-6-ethoxy-pseudo-uridine, 1-Methyl-6-ethylcarboxylate-pseudo-uridine, 1-Methyl-6-ethyl-pseudo-uridine, 1-Methyl-6-fluoro-pseudo-uridine, 1-Methyl-6-formyl-pseudo-uridine, 1-Methyl-6-hydroxyamino-pseudo-uridine, 1-Methyl-6-hydroxy-pseudo-uridine, 1-Methyl-6-iodo-pseudo-uridine, 1-Methyl-6-iso-propyl-pseudo-uridine, 1-Methyl-6-methoxy-pseudo-uridine, 1-Methyl-6-methylamino-pseudo-uridine, 1-Methyl-6-phenyl-pseudo-uridine, 1-Methyl-6-propyl-pseudo-uridine, 1-Methyl-6-tert-butyl-pseudo-uridine, 1-Methyl-6-trifluoromethoxy-pseudo-uridine, 1-Methyl-6-trifluoromethyl-pseudo-uridine, 1-Morpholinomethylpseudouridine, 1-Pentyl-pseudo-uridineuridine, 1-Phenyl-pseudo-uridine, 1-Pivaloylpseudouridine, 1-Propargylpseudouridine, 1-Propyl-pseudo-uridine, 1-propynyl-pseudouridine, 1-p-tolyl-pseudo-uridine, 1-tert-Butyl-pseudo-uridine, 1-Thiomethoxymethylpseudouridine, 1-Thiomorpholinomethylpseudouridine, 1-Trifluoroacetylpseudouridine, 1-Trifluoromethyl-pseudouridine, 1-Vinylpseudouridine, 2,2′-anhydro-uridine, 2′-bromo-deoxyuridine, 2′-F-5-Methyl-2′-deoxy-uridine, 2′-OMe-5-Me-uridine, 2′-OMe-pseudouridine, 2′-alpha-Ethynyluridine, 2′-alpha-Trifluoromethyluridine, 2′-beta-Ethynyluridine, 2′-beta-Trifluoromethyluridiner, 2′-Deoxy-2′,2′-difluorouridine, 2′-Deoxy-2′-a-mercaptouridin, 2′-Deoxy-2′-alpha-thiomethoxyuridine, 2′-Deoxy-2′-beta-aminouridine, 2′-Deoxy-2′-beta-azidouridine, 2′-Deoxy-2′-beta-bromouridine, 2′-Deoxy-2′-beta-chlorouridine, 2′-Deoxy-2′-beta-fluorouridine, 2′-Deoxy-2′-beta-iodouridine, 2′-Deoxy-2′-beta-mercaptouridine, 2′-Deoxy-2′-beta-thiomethoxyuridine, 2-methoxy-4-thio-uridine, 2-methoxyuridine, 2′-O-Methyl-5-(1-propynyl)uridine, 3-Alkyl-pseudo-uridine, 4′-Azidouridine, 4′-Carbocyclic uridine, 4′-Ethynyluridine, 5-(1-Propynyl)ara-uridine, 5-(2-Furanyl)uridine, 5-Cyanouridine, 5-Dimethylaminouridine, 5′-Homo-uridine, 5-iodo-2′-fluoro-deoxyuridine, 5-Phenylethynyluridine, 5-Trideuteromethyl-6-deuterouridine, 5-Trifluoromethyl-Uri dine, 5-Vinylarauridine, 6-(2,2,2-Trifluoroethyl)-pseudo-uridine, 6-(4-Morpholino)-pseudo-uridine, 6-(4-Thiomorpholino)-pseudo-uridine, 6-(Substituted-Phenyl)-pseudo-uridine, 6-Amino-pseudo-uridine, 6-Azido-pseudo-uridine, 6-Bromo-pseudo-uridine, 6-Butyl-pseudo-uridine, 6-Chloro-pseudo-uridine, 6-Cyano-pseudo-uridine, 6-Dimethylamino-pseudo-uridine, 6-Ethoxy-pseudo-uridine, 6-Ethylcarboxylate-pseudo-uridine, 6-Ethyl-pseudo-uridine, 6-Fluoro-pseudo-uridine, 6-Formyl-pseudo-uridine, 6-Hydroxyamino-pseudo-uridine, 6-Hydroxy-pseudo-uridine, 6-Iodo-pseudo-uridine, 6-iso-Propyl-pseudo-uridine, 6-Methoxy-pseudo-uridine, 6-Methylamino-pseudo-uridine, 6-Methyl-pseudo-uridine, 6-Phenyl-pseudo-uridine, 6-Phenyl-pseudo-uridine, 6-Propyl-pseudo-uridine, 6-tert-Butyl-pseudo-uridine, 6-Trifluoromethoxy-pseudo-uridine, 6-Trifluoromethyl-pseudo-uridine, alpha-thio-pseudo-uridine, Pseudouridine 1-(4-methylbenzenesulfonic, acid), Pseudouridine 1-(4-methylbenzoic acid) TP, Pseudouridine 1-[3-(2-, ethoxy)]propionic acid, Pseudouridine 1-[3-{2-(2-[2-(2-ethoxy,)-ethoxy]-ethoxy)-ethoxy}]propionic acid, Pseudouridine 1-[3-{2-(2-[2-{2(2-, ethoxy)-ethoxy}-ethoxy]-ethoxy)-ethoxy}]propionic acid, Pseudouridine 1-[3-{2-(2-[2-ethoxy]-ethoxy)-ethoxy}]propionic acid, Pseudouridine 1-[3-{2-(2-ethoxy)-, ethoxy}]propionic acid, Pseudouridine 1-methylphosphonic, acid, Pseudouridine TP 1-methylphosphonic acid diethyl ester, Pseudo-uridine-N1-3-propionic acid, Pseudo-uridine-N1-4-butanoic acid, Pseudo-uridine-N, 1-5-pentanoic acid, Pseudo-uridine-N1-6-hexanoic acid, Pseudo-uridine-N1-7-heptanoic acid, Pseudo-uridine-N1-methyl-p-benzoic acid, and pseudo-uridine-N1-p-benzoic acid.

[0080] In an embodiment, the bifunctional oligonucleotide described herein comprises a plurality of chemical modifications. In an embodiment, the bifunctional oligonucleotide comprises a chemical modification within the alternative splice site targeting sequence. In an embodiment, the bifunctional oligonucleotide comprises a chemical modification within the spliceosome targeting sequence. In an embodiment, the bifunctional oligonucleotide comprises a plurality of chemical modifications within splice site target sequence and the spliceosome targeting sequence. In an embodiment, the bifunctional oligonucleotide comprises a plurality of sugar modifications or LNAs. In an embodiment, the bifunctional oligonucleotide comprises at least 1, 2, 3, 4, 5, 6, 7, 8, 9, 10, 15, 20, 25, 30, or more sugar modifications (e.g., 2′O-Me modifications). In an embodiment, the bifunctional oligonucleotide comprises at least 1, 2, 3, 4, 5, 6, 7, 8, 9, 10, 15, 20, 25, 30, or more LNAs.

[0081] The bifunctional oligonucleotide may be targeted to an alternate splice site within a target gene, e.g., a target gene described herein, e.g., a target gene implicated in a repeat expansion disease. In an embodiment, the target gene is the Huntingtin gene (HTT). The nucleic acid sequence of an exemplary Homo sapiens (human) HTT gene is set forth in NCBI Reference NG_009378.1. In an embodiment, the target splice site sequence (e.g., 5′ splice site) is present within the HTT gene. In an embodiment, the target splice sequence is present within exon 1 of the HTT gene. In an embodiment, the target splice site sequence is within exon 1 of the HTT gene. In an embodiment, the target splice site sequence is upstream of a CAG region within exon 1. In an embodiment, the target splice site sequence comprises the sequence GAGT or AAGT. In an embodiment, the target splice site sequence comprises the sequence GAGT. In an embodiment, the target splice site sequence comprises the sequence AAGT.

[0082] In an embodiment, the bifunctional oligonucleotide comprises an alternative splice site targeting sequence that binds to a region with the HTT exon 1 sequence (SEQ ID NO: 001). Exemplary alternative splice sites include the underlined sequences GAGT (SEQ ID NO: 002) and AAGT (SEQ ID NO: 003).

HTT Exon 1 Sequence
(SEQ ID NO: 001)
CGAGTCGGCCCGAGGCCTCCGGGGACTGCCGTGCCGGGCGGGAGACCGC
CATGGCGACCCTGGAAAAGCTGATGAAGGCCTTCGAGTCCCTCAAGTCC
TTCCAGCAGCAGCAGCAGCAGCAGCAGCAGCAGCAGCAGCAGCAGCAGC
AGCAGCAGCAGCAACAGCCGCCACCGCCGCCGCCGCCGCCGCCGCCTCC
TCAGCTTCCTCAGCCGCCGCCGCAGGCACAGCCGCTGCTGCCTCAGCCG
CAGCCGCCCCCGCCGCCGCCCCCGCCGCCACCCGGCCCGGCTGTGGCTG
AGGAGCCGCTGCACCGACC

[0083] In an embodiment, the spliceosome targeting sequence recognizes the U1 snRNP. In an embodiment, the U1 snRNP is a wild type U1 snRNP or a variant or fragment thereof.

[0084] In an embodiment, the bifunctional oligonucleotide has a sequence selected from a sequence provided in Table 1 or 2. In Tables 1 and 2, an “m” placed before a nucleotide refers to a 2′OMe modification, and a “+” placed before a nucleotide refers to a locked nucleic acid (LNA). In an embodiment, the bifunctional oligonucleotide comprises a sequence with at least 75%, 80%, 85%, 90%, 95%, 99%, or more sequence identity with a nucleotide selected from SEQ ID NOs: 100-254, or a variant or fragment thereof. In an embodiment, the bifunctional oligonucleotide comprises the sequence GCCAGGUAAGUAU (SEQ ID NO: 004). In an embodiment, the bifunctional oligonucleotide comprises a sequence with at least 75%, 80%, 85%, 90%, 95%, 99%, or more sequence identity with SEQ TD NO: 004, or a variant or fragment thereof.

TABLE 1
Exemplary bifunctional oligonucleotides

| SEQ ID | | Molecular |
|---|---|---|
| NO. | Sequence | Weight |
| 100 | mGmCmCmAmGmG mUmAmAmGmUmAmUmAmU + Cm | 11053.3 |
| | UmUmG + GmAmCmC + CmGmUmC + CmCmGmG + CmA | |
| 101 | mGmCmCmAmGmGmUmAmA mGmUmAmUmCmA + | 11015.2 |
| | TmCmUmU + GmGmAmC + C mCmGmU + CmCmCmG + GmC | |
| 102 | mGmCmCmAmGmG mUmAmA mGmUmAmUmCmC + | 11015.2 |
| | AmUmCmU + TmG mGmA + C mCmCmG + TmCmC mC + GmG | |
| 103 | mGmCmCmAmGmG mUmAmA mGmUmAmUmUmC + | 10976.2 |
| | CmAmUmC + TmUmGmG + A mCmCmC + GmUmCmC + CmG | |
| 104 | mGmCmCmAmGmGmUmAmAmGmUmAmUmGmU + | 10990.2 |
| | CmCmAmU + CmUmUmG + G mAmCmC + CmGmUmC + CmC | |
| 105 | mGmCmCmAmGmG mUmAmA mGmUmAmUmCmG + | 10990.2 |
| | TmCmC mA + TmC mUmU + GmGmAmC + CmCmGmU + CmC | |
| 106 | mGmCmCmAmGmG mUmAmA mGmUmA mUmCmC + | 10976.2 |
| | GmUmCmC + AmUmCmU + T mGmGmA + CmCmCmG + TmC | |
| 107 | mGmCmC mAmGmG mUmAmA mGmUmAmUmGmC + | 11016.2 |
| | CmGmU mC + CmA mUmC + TmUmGmG + AmCmC mC + GmU | |
| 108 | mGmCmCmAmGmG mUmAmAmGmUmA mUmGmG + | 11069.3 |
| | CmCmGmU + CmC mAmU + CmUmUmG + GmAmCmC + CmG | |
| 109 | mGmCmCmAmGmGmUmAmA mGmUmAmUmCmG + | 11015.2 |
| | GmCmCmG + TmCmCmA + T mCmUmU + GmGmA mC + CmC | |
| 110 | mGmCmCmAmGmGmUmAmAmGmUmAmUmGmC + | 11041.2 |
| | GmGmCmC + GmUmCmC + A mUmCmU + TmGmG mA + CmC | |
| 111 | mGmCmCmAmGmGmUmAmAmGmUmAmUmAmG + | 11093.3 |
| | CmGmG mC + CmGmUmC + CmAmUmC + TmUmG mG + AmC | |
| 112 | mGmCmCmAmGmGmUmAmAmGmUmAmUmGmA + | 11119.3 |
| | GmCmG mG + CmCmGmU + CmCmAmU + CmUmU mG + GmA | |
| 113 | mGmCmCmAmGmG mUmAmAmGmUmAmUmUmG + | 11082.2 |
| | AmGmC mG + GmC mCmG + TmCmCmA + TmCmU mU + GmG | |
| 114 | mGmCmCmAmGmG mUmAmA mGmUmAmUmCmU + | 11028.2 |
| | GmAmGmC + GmGmCmC + G mUmCmC + AmUmC mU + TmG | |
| 115 | mGmCmCmAmGmGmUmAmAmGmUmAmUmCmC + | 11044.3 |
| | TmGmAmG + CmGmGmC + CmGmUmC + CmAmUmC + TmU | |
| 116 | mGmCmCmAmGmGmUmAmA mGmUmAmUmAmC + | 11053.3 |
| | CmUmG mA + GmCmGmG + C mCmGmU + CmCmA | |
| | mU + CmU | |
| 117 | mGmCmCmAmGmGmUmAmAmGmUmAmUmAmA + | 11062.3 |
| | CmCmUmG + AmGmCmG + G mCmCmG + TmCmC mA + TmC | |
| 118 | mGmCmCmAmGmGmUmAmAmGmUmAmUmGmA + | 11060.2 |
| | AmCmCmU + GmA mGmC + GmGmCmC + GmUmC mC + AmU | |
| 119 | mGmCmCmAmGmGmUmAmAmGmUmAmUmAmG + | 11139.4 |
| | AmAmCmC + TmG mAmG + C mGmGmC + CmGmUmC + CmA | |
| 120 | mGmCmCmAmGmG mUmAmAmGmUmAmUmCmA + | 11101.3 |
| | GmAmAmC + CmU mGmA + GmCmGmG + CmCmG mU + CmC | |
| 121 | mGmCmCmAmGmGmUmAmAmGmUmAmUmGmC + | 11127.3 |
| | AmGmAmA + CmCmUmG + A mGmCmG + GmCmC mG + TmC | |
| 122 | mGmCmCmAmGmG mUmAmAmGmUmAmUmAmG + | 11137.3 |
| | CmAmGmA + AmC mCmU + GmAmGmC + GmGmC mC + GmU | |
| 123 | mGmCmCmAmGmG mUmAmA mGmUmAmUmAmA + | 11188.4 |
| | GmCmAmG + AmA mCmC + T mGmAmG + CmGmG | |
| | mC + CmG | |
| 124 | mGmCmCmAmGmGmUmAmAmGmUmAmUmAmA + | 11158.4 |
| | AmGmCmA + GmAmAmC + C mUmGmA + GmCmG mG + CmC | |
| 125 | mGmCmCmAmGmG mUmAmAmGmUmAmUmAmA + | 11168.4 |
| | AmAmGmC + AmG mAmA + CmCmUmG + AmGmC mG + GmC | |
| 126 | mGmCmCmAmGmGmUmAmAmGmUmAmUmUmA + | 11169.4 |
| | AmAmAmG + CmAmGmA + AmCmCmU + GmAmG mC + GmG | |
| 127 | mGmCmCmAmGmG mUmAmAmGmUmAmUmGmU + | 11183.4 |
| | AmAmAmA + GmC mAmG + A mAmCmC + TmGmA | |
| | mG + CmG | |
| 128 | mGmCmCmAmGmGmUmAmAmGmUmAmUmGmG + | 11183.4 |
| | TmAmAmA + AmGmCmA + G mAmAmC + CmUmG mA + GmC | |
| 129 | mGmCmCmAmGmGmUmAmAmGmUmAmUmAmG + | 11193.4 |
| | GmUmAmA + AmAmGmC + AmGmAmA + CmCmUmG + AmG | |
| 130 | mGmCmCmAmGmGmUmAmAmGmUmAmUmCmA + | 11153.4 |
| | GmGmUmA + AmA mAmG + C mAmGmA + AmCmC | |
| | mU + GmA | |
| 131 | mGmCmCmAmGmGmUmAmAmGmUmAmUmGmC + | 11169.4 |
| | AmGmGmU + AmA mAmA + GmCmAmG + AmAmC mC + TmG | |
| 132 | mGmCmCmAmGmGmUmAmAmGmUmAmUmCmG + | 11157.4 |
| | CmAmGmG + TmAmAmA + A mGmCmA + GmAmA mC + CmU | |
| 133 | mGmCmCmAmGmGmUmAmAmGmUmAmUmCmC + | 11128.4 |
| | GmCmAmG + GmUmAmA + AmAmGmC + AmGmA mA + CmC | |
| 134 | mGmCmCmAmGmGmUmAmAmGmUmAmUmGmC + | 11182.4 |
| | CmGmCmA + GmGmUmA + AmAmAmG + CmAmG mA + AmC | |
| 135 | mGmCmCmAmGmGmUmAmAmGmUmAmUmGmG + | 11208.4 |
| | CmCmGmC + AmGmGmU + AmAmAmA + GmCmA mG + AmA | |
| 136 | mGmCmC mAmGmG mUmAmA mGmUmAmUmGmG + | 11238.4 |
| | GmCmCmG + CmAmGmG + T mAmAmA + AmGmC mA + GmA | |
| 137 | mGmCmCmAmGmGmUmAmAmGmUmAmUmUmG + | 11187.4 |
| | GmGmCmC + GmCmAmG + G mUmAmA + AmAmG | |
| | mC + AmG | |
| 138 | mGmCmCmAmGmGmUmAmAmGmUmAmUmCmU + | 11175.4 |
| | GmGmGmC + CmGmCmA + GmGmUmA + AmAmA mG + CmA | |
| 139 | mGmCmCmAmGmGmUmAmAmGmUmAmUmUmC + | 11152.3 |
| | TmGmGmG + CmCmGmC + AmGmGmU + AmAmA mA + GmC | |
| 140 | mGmCmC mAmGmG mUmAmA mGmUmA mUmCmU + | 11166.4 |
| | CmUmG mG + GmC mCmG + C mAmGmG + TmAmA | |
| | mA + AmG | |
| 141 | mGmCmCmAmGmGmUmAmAmGmUmAmUmGmC + | 11138.3 |
| | TmCmUmG + GmGmCmC + GmCmAmG + GmUmA mA + AmA | |
| 142 | mGmCmCmAmGmGmUmAmAmGmUmAmUmGmG + | 11168.3 |
| | CmUmCmU + GmGmGmC + CmGmCmA + GmGmU mA + AmA | |
| 143 | mGmCmCmAmGmGmUmAmAmGmUmAmUmGmG + | 11184.3 |
| | GmCmUmC + TmG mGmG + C mCmGmC + AmGmG | |
| | mU + AmA | |
| 144 | mGmCmCmAmGmGmUmAmAmGmUmAmUmUmC + | 11039.3 |
| | GmCmGmG + CmGmCmC + G mCmUmC + AmGmC mA + CmC | |
| 145 | mGmCmC mAmGmG mUmAmA mGmUmA mUmCmU + | 11053.3 |
| | CmGmC mG + GmC mGmC + C mGmCmU + CmAmG | |
| | mC + AmC | |
| 146 | mGmCmCmAmGmGmUmAmAmGmUmAmUmAmC + | 11091.3 |
| | TmCmG mC + GmGmCmG + CmCmGmC + TmCmA mG + CmA | |
| 147 | mGmCmCmAmGmG mUmAmAmGmUmAmUmGmA + | 11093.3 |
| | CmUmCmG + CmG mGmC + G mCmCmG + CmUmC mA + GmC | |
| 148 | mGmCmCmAmGmGmUmAmAmGmUmAmUmCmG + | 11065.3 |
| | AmCmUmC + GmC mGmG + CmGmCmC + GmCmU mC + AmG | |
| 149 | mGmCmCmAmGmGmUmAmAmGmUmAmUmCmC + | 11053.3 |
| | GmAmC mU + CmG mCmG + G mCmGmC + CmGmC | |
| | mU + CmA | |
| 150 | mGmCmCmAmGmGmUmAmAmGmUmAmUmAmG + | 11147.4 |
| | GmCmCmU + CmGmGmG + C mCmGmA + CmUmC mG + CmG | |
| 151 | mGmCmCmAmGmGmUmAmAmGmUmAmUmGmA + | 11105.3 |
| | GmGmCmC + TmCmGmG + G mCmCmG + AmCmU mC + GmC | |
| 152 | mGmCmCmAmGmGmUmAmAmGmUmAmUmGmG + | 11159.3 |
| | AmGmGmC + CmUmCmG + G mGmCmC + GmAmC mU + CmG | |
| 153 | mGmCmCmAmGmGmUmAmAmGmUmAmUmCmG + | 11133.3 |
| | GmAmG mG + CmC mUmC + G mGmGmC + CmGmA | |
| | mC + TmC | |
| 154 | mGmCmCmAmGmGmUmAmAmGmUmAmUmCmC + | 11133.3 |
| | GmGmAmG + GmCmCmU + CmGmGmG + CmCmG mA + CmU | |
| 155 | mGmCmCmAmGmGmUmAmAmGmUmAmUmAmG + | 11133.3 |
| | TmCmCmC + CmGmGmA + G mGmCmC + TmCmG mG + GmC | |
| 156 | mGmCmCmAmGmGmUmAmAmGmUmAmUmCmA + | 11119.3 |
| | GmUmCmC + CmCmGmG + AmGmGmC + CmUmC mG + GmG | |
| 157 | mGmCmCmAmGmGmUmAmAmGmUmAmUmGmC + | 11119.3 |
| | AmGmUmC + CmCmCmG + GmAmGmG + CmCmU mC + GmG | |
| 158 | mGmCmCmAmGmGmUmAmAmGmUmAmUmGmG + | 11133.3 |
| | CmAmG mU + CmC mCmC + G mGmAmG + GmCmC | |
| | mU + CmG | |
| 159 | mGmCmCmAmGmGmUmAmAmGmUmAmUmCmG + | 11093.3 |
| | GmCmAmG + TmCmCmC + C mGmGmA + GmGmC mC + TmC | |
| 160 | mGmCmCmAmGmGmUmAmAmGmUmAmUmAmC + | 11103.3 |
| | GmGmCmA + GmU mCmC + CmCmGmG + AmGmG mC + CmU | |
| 161 | mGmCmCmAmGmGmUmAmAmGmUmAmUmCmA + | 11116.3 |
| | CmGmGmC + AmGmUmC + CmCmCmG + GmAmGmG + CmC | |
| 162 | mGmCmCmAmGmGmUmAmAmGmUmAmUmGmC + | 11142.3 |
| | AmCmGmG + CmAmGmU + C mCmCmC + GmGmA | |
| | mG + GmC | |
| 163 | mGmCmCmAmGmGmUmAmAmGmUmAmUmGmG + | 11196.4 |
| | CmAmCmG + GmCmAmG + TmCmCmC + CmGmGmA + GmG | |
| 164 | mGmCmCmAmGmGmUmAmAmGmUmAmUmCmG + | 11128.3 |
| | GmCmAmC + GmGmCmA + G mUmCmC + CmCmG mG + AmG | |
| 165 | mGmCmCmAmGmGmUmAmAmGmUmAmUmCmC + | 11102.3 |
| | GmGmCmA + CmGmGmC + AmGmUmC + CmCmCmG + GmA | |
| 166 | mGmCmCmAmGmGmUmAmAmGmUmAmUmUmC + | 11067.3 |
| | CmCmGmC + CmC mGmG + CmAmCmG + GmCmA mG + TmC | |
| 167 | mGmCmC mAmGmG mUmAmA mGmUmA mUmCmU + | 11039.3 |
| | CmCmC mG + CmC mCmG + G mCmAmC + GmGmC | |
| | mA + GmU | |
| 168 | mGmCmCmAmGmGmUmAmAmGmUmAmUmUmC + | 11039.3 |
| | TmCmCmC + GmCmCmC + G mGmCmA + CmGmGmC + AmG | |
| 169 | mGmCmCmAmGmGmUmAmAmGmUmAmUmGmU + | 11067.3 |
| | CmUmC mC + CmGmCmC + CmGmGmC + AmCmG mG + CmA | |
| 170 | mGmCmCmAmGmGmUmAmAmGmUmAmUmUmG + | 11084.3 |
| | GmCmG mG + TmCmUmC + CmCmGmC + CmCmGmG + CmA | |
| 171 | mGmCmCmAmGmGmUmAmAmGmUmAmUmAmU + | 11056.2 |
| | GmGmCmG + GmUmCmU + CmCmCmG + CmCmCmG + GmC | |
| 172 | mGmCmCmAmGmGmUmAmAmGmUmAmUmCmA + | 11056.2 |
| | TmGmGmC + GmG mUmC + TmCmCmC + GmCmCmC + GmG | |
| 173 | mGmCmCmAmGmGmUmAmAmGmUmAmUmCmC + | 11044.3 |
| | AmUmGmG + CmGmGmU + C mUmCmC + CmGmCmC + CmG | |
| 174 | mGmCmCmAmGmGmUmAmAmGmUmA mUmGmC + | 11044.3 |
| | CmAmUmG + GmCmGmG + T mCmUmC + CmCmG mC + CmC | |
| 175 | mGmCmC mAmGmGmUmAmAmGmUmAmUmCmG + | 11030.2 |
| | CmCmA mU + GmGmCmG + GmUmCmU + CmCmC mG + CmC | |
| 176 | mGmCmCmAmGmGmUmAmAmGmUmAmUmUmC + | 11017.2 |
| | GmCmCmA + TmGmGmC + G mGmUmC + TmCmCmC + GmC | |
| 177 | mGmCmCmAmGmGmUmAmAmGmUmAmUmGmU + | 11085.3 |
| | CmGmCmC + AmUmGmG + CmGmGmU + CmUmCmC + CmG | |
| 178 | mGmCmCmAmGmGmUmAmAmGmUmAmUmGmG + | 11085.3 |
| | TmCmGmC + CmAmUmG + G mCmGmG + TmCmUmC + CmC | |
| 179 | mGmCmCmAmGmGmUmAmAmGmUmAmUmGmG + | 11097.3 |
| | GmUmCmG + CmC mAmU + G mGmCmG + GmUmC | |
| | mU + CmC | |
| 180 | mGmCmCmAmGmGmUmAmAmGmUmAmUmAmG + | 11121.3 |
| | GmGmUmC + GmCmCmA + T mGmGmC + GmGmU mC + TmC | |
| 181 | mGmCmC mAmGmG mUmAmA mGmUmAmUmCmA + | 11135.3 |
| | GmGmG mU + CmG mCmC + A mUmGmG + CmGmG | |
| | mU + CmU | |
| 182 | mGmCmCmAmGmGmUmAmAmGmUmAmUmCmC + | 11134.3 |
| | AmGmGmG + TmC mGmC + CmAmUmG + GmCmG mG + TmC | |
| 183 | mGmCmCmAmGmGmUmAmAmGmUmAmUmUmC + | 11121.3 |
| | CmAmGmG + GmUmCmG + CmCmAmU + GmGmCmG + GmU | |
| 184 | mGmCmCmAmGmGmUmAmAmGmUmAmUmUmU + | 11121.3 |
| | CmCmA mG + GmG mUmC + GmCmCmA + TmGmG | |
| | mC + GmG | |
| 185 | mGmCmCmAmGmGmUmAmAmGmUmAmUmUmU + | 11096.3 |
| | TmCmCmA + GmGmGmU + CmGmCmC + AmUmG mG + CmG | |
| 186 | mGmCmCmAmGmGmUmAmAmGmUmAmUmUmU + | 11057.2 |
| | TmUmCmC + AmGmGmG + TmCmGmC + CmAmUmG + GmC | |
| 187 | mGmCmCmAmGmG mUmAmAmGmUmA mUmCmU + | 11057.2 |
| | TmUmUmC + CmAmGmG + GmUmCmG + CmCmA mU + GmG | |
| 188 | mGmCmCmAmGmG mUmAmA mGmUmAmUmGmC + | 11057.2 |
| | TmUmUmU + CmC mAmG + G mGmUmC + GmCmC | |
| | mA + TmG | |
| 189 | mGmCmCmAmGmGmUmAmAmGmUmAmUmAmG + | 11041.2 |
| | CmUmU mU + TmCmCmA + GmGmGmU + CmGmC mC + AmU | |
| 190 | mGmCmCmAmGmGmUmAmAmGmUmA mUmCmA + | 11040.2 |
| | GmCmUmU + TmUmCmC + A mGmGmG + TmCmG mC + CmA | |
| 191 | mGmCmCmAmGmGmUmAmAmGmUmAmUmUmC + | 11017.2 |
| | AmGmC mU + TmUmUmC + CmAmGmG + GmUmC mG + CmC | |
| 192 | mGmCmCmAmGmGmUmAmAmGmUmAmUmAmU + | 11041.2 |
| | CmAmGmC + TmUmUmU + CmCmAmG + GmGmU mC + GmC | |
| 193 | mGmCmCmAmGmG mUmAmAmGmUmAmUmCmA + | 11055.2 |
| | TmCmAmG + CmU mUmU + T mCmCmA + GmGmG mU + CmG | |
| 194 | mGmCmCmAmGmG mUmAmA mGmUmA mUmUmC + | 10988.2 |
| | AmUmCmA + GmC mUmU + T mUmCmC + AmGmG | |
| | mG + TmC | |
| 195 | mGmCmCmAmGmGmUmAmAmGmUmAmUmUmU + | 11003.2 |
| | CmAmUmC + AmG mCmU + TmUmUmC + CmAmG | |
| | mG + GmU | |
| 196 | mGmCmCmAmGmGmUmAmA mGmUmAmUmCmU + | 11016.2 |
| | TmCmAmU + CmAmGmC + T mUmUmU + CmCmA mG + GmG | |
| 197 | mGmCmCmAmGmGmUmAmAmGmUmAmUmCmC + | 10976.2 |
| | TmUmC mA + TmC mAmG + C mUmUmU + TmCmC | |
| | mA + GmG | |
| 198 | mGmCmCmAmGmGmUmAmAmGmUmAmUmGmC + | 10948.1 |
| | CmUmUmC + AmUmCmA + G mCmUmU + TmUmC | |
| | mC + AmG | |
| 199 | mGmCmCmAmGmGmUmAmAmGmUmAmUmGmG + | 10976.2 |
| | CmCmUmU + CmAmUmC + A mGmCmU + TmUmU mC + CmA | |
| 200 | mGmCmCmAmGmG mUmAmA mGmUmAmUmAmG + | 10976.2 |
| | GmCmCmU + TmC mAmU + C mAmGmC + TmUmU | |
| | mU + CmC | |
| 201 | mGmCmCmAmGmGmUmAmAmGmUmAmUmAmA + | 11000.2 |
| | GmGmC mC + TmUmCmA + TmCmAmG + CmUmU mU + TmC | |
| 202 | mGmCmCmAmGmGmUmAmAmGmUmAmUmGmA + | 11012.2 |
| | AmGmGmC + CmUmUmC + AmUmCmA + GmCmU mU + TmU | |
| 203 | mGmCmCmAmGmGmUmAmAmGmUmAmUmCmG + | 11025.2 |
| | AmAmGmG + CmCmUmU + C mAmUmC + AmGmC mU + TmU | |
| 204 | mGmCmCmAmGmGmUmAmA mGmUmAmUmUmC + | 11025.2 |
| | GmAmA mG + GmCmCmU + T mCmAmU + CmAmG mC + TmU | |
| 205 | mGmCmCmAmGmGmUmAmAmGmUmAmUmAmC + | 11033.3 |
| | TmCmGmA + AmG mGmC + C mUmUmC + AmUmC | |
| | mA + GmC | |
| 206 | mGmCmCmAmGmGmUmAmAmGmUmAmUmGmA + | 11087.3 |
| | CmUmCmG + AmAmGmG + CmCmUmU + CmAmUmC + AmG | |
| 207 | mGmCmCmAmGmGmUmAmAmGmUmAmUmGmG + | 11073.3 |
| | AmCmUmC + GmAmAmG + G mCmCmU + TmCmA mU + CmA | |
| 208 | mGmCmCmAmGmGmUmAmAmGmUmAmUmGmG + | 11103.3 |
| | GmAmCmU + CmG mAmA + G mGmCmC + TmUmC mA + TmC | |
| 209 | mGmCmCmAmGmGmUmAmAmGmUmAmUmAmG + | 11113.3 |
| | GmGmAmC + TmC mGmA + AmGmGmC + CmUmUmC + AmU | |
| 210 | mGmCmCmAmGmGmUmAmAmGmUmAmUmGmA + | 11166.4 |
| | GmGmG mA + CmUmCmG + A mAmGmG + CmCmU | |
| | mU + CmA | |
| 211 | mGmCmCmAmGmGmUmAmAmGmUmAmUmUmG + | 11115.3 |
| | AmGmGmG + AmCmUmC + GmAmAmG + GmCmC mU + TmC | |
| 212 | mGmCmCmAmGmGmUmAmAmGmUmAmUmUmU + | 11130.3 |
| | GmAmG mG + GmAmCmU + CmGmAmA + GmGmC mC + TmU | |
| 213 | mGmCmCmAmGmGmUmAmAmGmUmAmUmCmU + | 11143.3 |
| | TmGmAmG + GmGmAmC + TmCmGmA + AmGmGmC + CmU | |
| 214 | mGmCmCmAmGmGmUmAmAmGmUmAmUmAmC + | 11166.4 |
| | TmUmGmA + GmG mGmA + CmUmCmG + AmAmG mG + CmC | |
| 215 | mGmCmCmAmGmGmUmAmAmGmUmAmUmGmA + | 11178.3 |
| | CmUmUmG + AmGmGmG + A mCmUmC + GmAmA | |
| | mG + GmC | |
| 216 | mGmCmCmAmGmGmUmAmAmGmUmAmUmGmG + | 11218.4 |
| | AmCmUmU + GmAmGmG + G mAmCmU + CmGmA | |
| | mA + GmG | |
| 217 | mGmCmCmAmGmGmUmAmAmGmUmAmUmAmG + | 11216.4 |
| | GmAmC mU + TmG mAmG + G mGmAmC + TmCmG | |
| | mA + AmG | |
| 218 | mGmCmCmAmGmGmUmAmAmGmUmAmUmAmA + | 11200.4 |
| | GmGmAmC + TmUmGmA + G mGmGmA + CmUmC mG + AmA | |
| 219 | mGmCmCmAmGmGmUmAmAmGmUmAmUmGmA + | 11202.4 |
| | AmGmGmA + CmUmUmG + AmGmGmG + AmCmU mC + GmA | |
| 220 | mGmCmCmAmGmGmUmAmAmGmUmAmUmGmG + | 11218.4 |
| | AmAmGmG + AmCmUmU + G mAmGmG + GmAmC | |
| | mU + CmG | |
| 221 | mGmCmCmAmGmGmUmAmAmGmUmAmUmUmG + | 11193.3 |
| | GmAmAmG + GmAmCmU + TmGmAmG + GmGmA mC + TmC | |
| 222 | mGmCmCmAmGmGmUmAmAmGmUmAmUmCmU + | 11193.4 |
| | GmGmAmA + GmGmAmC + TmUmGmA + GmGmG mA + CmU | |
| 223 | mGmCmC mAmGmG mUmAmA mGmUmA mUmGmC + | 11232.4 |
| | TmGmG mA + AmG mGmA + C mUmUmG + AmGmG | |
| | mG + AmC | |
| 224 | mGmCmCmAmGmGmUmAmAmGmUmAmUmUmG + | 11219.3 |
| | CmUmG mG + AmAmGmG + A mCmUmU + GmAmG | |
| | mG + GmA | |
| 225 | mGmCmCmAmGmGmUmAmAmGmUmAmUmCmU + | 11195.3 |
| | GmCmUmG + GmAmAmG + GmAmCmU + TmGmA mG + GmG | |
| 226 | mGmCmCmAmGmGmUmAmAmGmUmAmUmGmC + | 11209.3 |
| | TmGmCmU + GmG mAmA + G mGmAmC + TmUmG | |
| | mA + GmG | |
| 227 | mGmCmCmAmGmGmUmAmAmGmUmAmUmUmG + | 11184.3 |
| | CmUmGmC + TmGmGmA + AmGmGmA + CmUmUmG + AmG | |
| 228 | mGmU + CmCmAmU + CmUmUmG + GmAmCmC + C | 10990.2 |
| | mGmUmC + CmCmG mCmCmAmGmGmUmAmAmG | |
| | mUmAmU | |
| 229 | mCmG + G mCmCmG + TmCmC mA + TmC mUmU + G | 11015.2 |
| | mGmAmC + CmCmG mCmCmA mGmGmU mAmAmG | |
| | mUmAmU | |
| 230 | mCmU + G mAmGmC + GmGmCmC + GmUmCmC + A | 11028.2 |
| | mUmCmU + TmGmG mCmCmA mGmGmUmAmAmG | |
| | mUmAmU | |
| 231 | mAmG + AmAmCmC + TmGmAmG + CmGmGmC + C mGmUmC + | 11139.4 |
| | CmAmGmCmCmAmGmGmUmAmAmG mUmAmU | |
| 232 | mAmA + A mGmCmA + GmAmAmC + CmUmGmA + G | 11158.4 |
| | mCmGmG + CmCmG mCmCmAmGmGmUmAmAmG | |
| | mUmAmU | |
| 233 | mAmG + GmUmAmA + AmAmGmC + AmG mAmA + C | 11193.4 |
| | mCmUmG + AmGmGmCmCmAmGmGmU mAmAmG | |
| | mUmAmU | |
| 234 | mGmC + CmGmCmA + GmGmUmA + AmAmAmG + C | 11182.4 |
| | mAmGmA + AmCmG mCmCmAmGmGmUmAmAmG | |
| | mUmAmU | |
| 235 | mUmC + TmGmGmG + CmCmGmC + AmG mGmU + A | 11152.3 |
| | mAmAmA + GmCmGmCmCmA mGmGmU mAmAmG | |
| | mUmAmU | |
| 236 | mUmC + G mCmGmG + CmGmCmC + GmC mUmC + A | 11039.3 |
| | mGmCmA + CmCmGmCmCmAmGmGmUmAmAmG | |
| | mUmAmU | |
| 237 | mCmC + G mAmCmU + CmGmC mG + GmCmGmC + C | 11053.3 |
| | mGmCmU + CmAmG mCmCmA mGmGmUmAmAmG | |
| | mUmAmU | |
| 238 | mCmC + G mGmAmG + GmCmCmU + CmGmGmG + C | 11133.3 |
| | mCmGmA + CmUmGmCmCmAmGmGmUmAmAmG | |
| | mUmAmU | |
| 239 | mCmG + G mCmAmG + TmCmCmC + CmG mGmA + G | 11093.3 |
| | mGmCmC + TmCmGmCmCmAmGmGmU mAmAmG | |
| | mUmAmU | |
| 240 | mCmG + GmCmAmC + GmGmCmA + GmU mCmC + C | 11128.3 |
| | mCmGmG + AmGmGmCmCmA mGmGmU mAmAmG | |
| | mUmAmU | |
| 241 | mGmU + CmUmCmC + CmGmCmC + CmGmGmC + A | 11067.3 |
| | mCmGmG + CmAmG mCmCmA mGmGmUmAmAmG | |
| | mUmAmU | |
| 242 | mGmC + CmAmUmG + GmCmG mG + TmCmUmC + C | 11044.3 |
| | mCmGmC + CmCmG mCmCmA mGmGmUmAmAmG | |
| | mUmAmU | |
| 243 | mGmG + G mUmCmG + CmCmAmU + GmGmCmG + G | 11097.3 |
| | mUmCmU + CmCmG mCmCmAmGmGmUmAmAmG | |
| | mUmAmU | |
| 244 | mUmU + CmCmAmG + GmGmUmC + GmC mCmA + T | 11121.3 |
| | mGmGmC + GmGmGmCmCmAmGmGmU mAmAmG | |
| | mUmAmU | |
| 245 | mAmG + CmUmUmU + TmCmCmA + GmG mGmU + C | 11041.2 |
| | mGmCmC + AmUmGmCmCmAmGmGmU mAmAmG | |
| | mUmAmU | |
| 246 | mUmC + AmUmCmA + GmCmUmU + TmUmCmC + A | 10988.2 |
| | mGmGmG + TmCmGmCmCmAmGmGmUmAmAmG | |
| | mUmAmU | |
| 247 | mGmG + CmCmUmU + CmAmUmC + AmGmCmU + T | 10976.2 |
| | mUmUmC + CmAmGmCmCmAmGmGmUmAmAmG | |
| | mUmAmU | |
| 248 | mUmC + GmAmAmG + GmCmCmU + TmC mAmU + C | 11025.2 |
| | mAmGmC + TmUmGmCmCmAmGmGmU mAmAmG | |
| | mUmAmU | |
| 249 | mGmG + G mAmCmU + CmGmAmA + GmGmCmC + T | 11103.3 |
| | mUmCmA + TmCmGmCmCmAmGmGmUmAmAmG | |
| | mUmAmU | |
| 250 | mCmU + T mGmAmG + GmGmA mC + TmCmGmA + A | 11143.3 |
| | mGmGmC + CmUmGmCmCmAmGmGmUmAmAmG | |
| | mUmAmU | |
| 251 | mAmA + GmGmAmC + TmUmGmA + GmGmGmA + C | 11200.4 |
| | mUmCmG + AmAmGmCmCmAmGmGmUmAmAmG | |
| | mUmAmU | |
| 252 | mGmC + T mGmGmA + AmGmGmA + CmUmUmG + A | 11232.4 |
| | mGmGmG + AmCmGmCmCmA mGmGmUmAmAmG | |
| | mUmAmU | |
| 253 | mGmCmCmAmGmGmUmAmAmGmUmAmUmGmU + | 11063.3 |
| | CmAmGmA + AmAmUmA + CmAmCmA + AmUmAmC + CmU | |
| 254 | mGmU + CmAmGmA + AmAmUmA + CmAmCmA + A | 11063.3 |
| | mUmAmC + CmUmGmCmCmAmGmGmUmAmAmG | |
| | mUmAmU | |

TABLE 2
Exemplary bifunctional oligonucleotides with reference sequences

| SEQ ID | | |
|---|---|---|
| NO. | Reference sequence | Sequence |
| 100 | GCCAGGUAAGUAUA | mGmCmCmAmGmGmUmAmAmGmUmAmUmAmU+C |
| | UCUUGGACCCGUCCC | mUmUmG+GmAmCmC+CmGmUmC+CmCmGmG+Cm |
| | GGCA | A |
| 101 | GCCAGGUAAGUAUC | mGmCmCmAmGmGmUmAmAmGmUmAmUmCmA+T |
| | ATCUUGGACCCGUCC | mCmUmU+GmGmAmC+CmCmGmU+CmCmCmG+Gm |
| | CGGC | C |
| 102 | GCCAGGUAAGUAUC | mGmCmCmAmGmGmUmAmAmGmUmAmUmCmC+A |
| | CAUCUTGGACCCGTC | mUmCmU+TmGmGmA+CmCmCmG+TmCmCmC+Gm |
| | CCGG | G |
| 103 | GCCAGGUAAGUAUU | mGmCmCmAmGmGmUmAmAmGmUmAmUmUmC+C |
| | CCAUCTUGGACCCGU | mAmUmC+TmUmGmG+AmCmCmC+GmUmCmC+Cm |
| | CCCG | G |
| 104 | GCCAGGUAAGUAUG | mGmCmCmAmGmGmUmAmAmGmUmAmUmGmU+C |
| | UCCAUCUUGGACCC | mCmAmU+CmUmUmG+GmAmCmC+CmGmUmC+Cm |
| | GUCCC | C |
| 105 | GCCAGGUAAGUAUC | mGmCmCmAmGmGmUmAmAmGmUmAmUmCmG+T |
| | GTCCATCUUGGACCC | mCmCmA+TmCmUmU+GmGmAmC+CmCmGmU+Cm |
| | GUCC | C |
| 106 | GCCAGGUAAGUAUC | mGmCmCmAmGmGmUmAmAmGmUmAmUmCmC+G |
| | CGUCCAUCUTGGACC | mUmCmC+AmUmCmU+TmGmGmA+CmCmCmG+Tm |
| | CGTC | C |
| 107 | GCCAGGUAAGUAUG | mGmCmCmAmGmGmUmAmAmGmUmAmUmGmC+C |
| | CCGUCCAUCTUGGAC | mGmUmC+CmAmUmC+TmUmGmG+AmCmCmC+Gm |
| | CCGU | U |
| 108 | GCCAGGUAAGUAUG | mGmCmCmAmGmGmUmAmAmGmUmAmUmGmG+C |
| | GCCGUCCAUCUUGG | mCmGmU+CmCmAmU+CmUmUmG+GmAmCmC+Cm |
| | ACCCG | G |
| 109 | GCCAGGUAAGUAUC | mGmCmCmAmGmGmUmAmAmGmUmAmUmCmG+G |
| | GGCCGTCCATCUUGG | mCmCmG+TmCmCmA+TmCmUmU+GmGmAmC+Cm |
| | ACCC | C |
| 110 | GCCAGGUAAGUAUG | mGmCmCmAmGmGmUmAmAmGmUmAmUmGmC+G |
| | CGGCCGUCCAUCUTG | mGmCmC+GmUmCmC+AmUmCmU+TmGmGmA+Cm |
| | GACC | C |
| 111 | GCCAGGUAAGUAUA | mGmCmCmAmGmGmUmAmAmGmUmAmUmAmG+C |
| | GCGGCCGUCCAUCTU | mGmGmC+CmGmUmC+CmAmUmC+TmUmGmG+Am |
| | GGAC | C |
| 112 | GCCAGGUAAGUAUG | mGmCmCmAmGmGmUmAmAmGmUmAmUmGmA+G |
| | AGCGGCCGUCCAUC | mCmGmG+CmCmGmU+CmCmAmU+CmUmUmG+Gm |
| | UUGGA | A |
| 113 | GCCAGGUAAGUAUU | mGmCmCmAmGmGmUmAmAmGmUmAmUmUmG+A |
| | GAGCGGCCGTCCATC | mGmCmG+GmCmCmG+TmCmCmA+TmCmUmU+Gm |
| | UUGG | G |
| 114 | GCCAGGUAAGUAUC | mGmCmCmAmGmGmUmAmAmGmUmAmUmCmU+G |
| | UGAGCGGCCGUCCA | mAmGmC+GmGmCmC+GmUmCmC+AmUmCmU+Tm |
| | UCUTG | G |
| 115 | GCCAGGUAAGUAUC | mGmCmCmAmGmGmUmAmAmGmUmAmUmCmC+T |
| | CTGAGCGGCCGUCCA | mGmAmG+CmGmGmC+CmGmUmC+CmAmUmC+Tm |
| | UCTU | U |
| 116 | GCCAGGUAAGUAUA | mGmCmCmAmGmGmUmAmAmGmUmAmUmAmC+C |
| | CCUGAGCGGCCGUCC | mUmGmA+GmCmGmG+CmCmGmU+CmCmAmU+Cm |
| | AUCU | U |
| 117 | GCCAGGUAAGUAUA | mGmCmCmAmGmGmUmAmAmGmUmAmUmAmA+C |
| | ACCUGAGCGGCCGTC | mCmUmG+AmGmCmG+GmCmCmG+TmCmCmA+Tm |
| | CATC | C |
| 118 | GCCAGGUAAGUAUG | mGmCmCmAmGmGmUmAmAmGmUmAmUmGmA+A |
| | AACCUGAGCGGCCG | mCmCmU+GmAmGmC+GmGmCmC+GmUmCmC+Am |
| | UCCAU | U |
| 119 | GCCAGGUAAGUAUA | mGmCmCmAmGmGmUmAmAmGmUmAmUmAmG+A |
| | GAACCTGAGCGGCCG | mAmCmC+TmGmAmG+CmGmGmC+CmGmUmC+Cm |
| | UCCA | A |
| 120 | GCCAGGUAAGUAUC | mGmCmCmAmGmGmUmAmAmGmUmAmUmCmA+G |
| | AGAACCUGAGCGGC | mAmAmC+CmUmGmA+GmCmGmG+CmCmGmU+Cm |
| | CGUCC | C |
| 121 | GCCAGGUAAGUAUG | mGmCmCmAmGmGmUmAmAmGmUmAmUmGmC+A |
| | CAGAACCUGAGCGG | mGmAmA+CmCmUmG+AmGmCmG+GmCmCmG+Tm |
| | CCGTC | C |
| 122 | GCCAGGUAAGUAUA | mGmCmCmAmGmGmUmAmAmGmUmAmUmAmG+C |
| | GCAGAACCUGAGCG | mAmGmA+AmCmCmU+GmAmGmC+GmGmCmC+Gm |
| | GCCGU | U |
| 123 | GCCAGGUAAGUAUA | mGmCmCmAmGmGmUmAmAmGmUmAmUmAmA+G |
| | AGCAGAACCTGAGC | mCmAmG+AmAmCmC+TmGmAmG+CmGmGmC+Cm |
| | GGCCG | G |
| 124 | GCCAGGUAAGUAUA | mGmCmCmAmGmGmUmAmAmGmUmAmUmAmA+A |
| | AAGCAGAACCUGAG | mGmCmA+GmAmAmC+CmUmGmA+GmCmGmG+Cm |
| | CGGCC | C |
| 125 | GCCAGGUAAGUAUA | mGmCmCmAmGmGmUmAmAmGmUmAmUmAmA+A |
| | AAAGCAGAACCUGA | mAmGmC+AmGmAmA+CmCmUmG+AmGmCmG+G |
| | GCGGC | mC |
| 126 | GCCAGGUAAGUAUU | mGmCmCmAmGmGmUmAmAmGmUmAmUmUmA+A |
| | AAAAGCAGAACCUG | mAmAmG+CmAmGmA+AmCmCmU+GmAmGmC+G |
| | AGCGG | mG |
| 127 | GCCAGGUAAGUAUG | mGmCmCmAmGmGmUmAmAmGmUmAmUmGmU+A |
| | UAAAAGCAGAACCT | mAmAmA+GmCmAmG+AmAmCmC+TmGmAmG+Cm |
| | GAGCG | G |
| 128 | GCCAGGUAAGUAUG | mGmCmCmAmGmGmUmAmAmGmUmAmUmGmG+T |
| | GTAAAAGCAGAACC | mAmAmA+AmGmCmA+GmAmAmC+CmUmGmA+G |
| | UGAGC | mC |
| 129 | GCCAGGUAAGUAUA | mGmCmCmAmGmGmUmAmAmGmUmAmUmAmG+G |
| | GGUAAAAGCAGAAC | mUmAmA+AmAmGmC+AmGmAmA+CmCmUmG+A |
| | CUGAG | mG |
| 130 | GCCAGGUAAGUAUC | mGmCmCmAmGmGmUmAmAmGmUmAmUmCmA+G |
| | AGGUAAAAGCAGAA | mGmUmA+AmAmAmG+CmAmGmA+AmCmCmU+G |
| | CCUGA | mA |
| 131 | GCCAGGUAAGUAUG | mGmCmCmAmGmGmUmAmAmGmUmAmUmGmC+A |
| | CAGGUAAAAGCAGA | mGmGmU+AmAmAmA+GmCmAmG+AmAmCmC+Tm |
| | ACCTG | G |
| 132 | GCCAGGUAAGUAUC | mGmCmCmAmGmGmUmAmAmGmUmAmUmCmG+C |
| | GCAGGTAAAAGCAG | mAmGmG+TmAmAmA+AmGmCmA+GmAmAmC+Cm |
| | AACCU | U |
| 133 | GCCAGGUAAGUAUC | mGmCmCmAmGmGmUmAmAmGmUmAmUmCmC+G |
| | CGCAGGUAAAAGCA | mCmAmG+GmUmAmA+AmAmGmC+AmGmAmA+C |
| | GAACC | mC |
| 134 | GCCAGGUAAGUAUG | mGmCmCmAmGmGmUmAmAmGmUmAmUmGmC+C |
| | CCGCAGGUAAAAGC | mGmCmA+GmGmUmA+AmAmAmG+CmAmGmA+A |
| | AGAAC | mC |
| 135 | GCCAGGUAAGUAUG | mGmCmCmAmGmGmUmAmAmGmUmAmUmGmG+C |
| | GCCGCAGGUAAAAG | mCmGmC+AmGmGmU+AmAmAmA+GmCmAmG+A |
| | CAGAA | mA |
| 136 | GCCAGGUAAGUAUG | mGmCmCmAmGmGmUmAmAmGmUmAmUmGmG+G |
| | GGCCGCAGGTAAAA | mCmCmG+CmAmGmG+TmAmAmA+AmGmCmA+Gm |
| | GCAGA | A |
| 137 | GCCAGGUAAGUAUU | mGmCmCmAmGmGmUmAmAmGmUmAmUmUmG+G |
| | GGGCCGCAGGUAAA | mGmCmC+GmCmAmG+GmUmAmA+AmAmGmC+A |
| | AGCAG | mG |
| 138 | GCCAGGUAAGUAUC | mGmCmCmAmGmGmUmAmAmGmUmAmUmCmU+G |
| | UGGGCCGCAGGUAA | mGmGmC+CmGmCmA+GmGmUmA+AmAmAmG+C |
| | AAGCA | mA |
| 139 | GCCAGGUAAGUAUU | mGmCmCmAmGmGmUmAmAmGmUmAmUmUmC+T |
| | CTGGGCCGCAGGUA | mGmGmG+CmCmGmC+AmGmGmU+AmAmAmA+G |
| | AAAGC | mC |
| 140 | GCCAGGUAAGUAUC | mGmCmCmAmGmGmUmAmAmGmUmAmUmCmU+C |
| | UCUGGGCCGCAGGT | mUmGmG+GmCmCmG+CmAmGmG+TmAmAmA+Am |
| | AAAAG | G |
| 141 | GCCAGGUAAGUAUG | mGmCmCmAmGmGmUmAmAmGmUmAmUmGmC+T |
| | CTCUGGGCCGCAGGU | mCmUmG+GmGmCmC+GmCmAmG+GmUmAmA+A |
| | AAAA | mA |
| 142 | GCCAGGUAAGUAUG | mGmCmCmAmGmGmUmAmAmGmUmAmUmGmG+C |
| | GCUCUGGGCCGCAG | mUmCmU+GmGmGmC+CmGmCmA+GmGmUmA+A |
| | GUAAA | mA |
| 143 | GCCAGGUAAGUAUG | mGmCmCmAmGmGmUmAmAmGmUmAmUmGmG+G |
| | GGCUCTGGGCCGCAG | mCmUmC+TmGmGmG+CmCmGmC+AmGmGmU+Am |
| | GUAA | A |
| 144 | GCCAGGUAAGUAUU | mGmCmCmAmGmGmUmAmAmGmUmAmUmUmC+G |
| | CGCGGCGCCGCUCAG | mCmGmG+CmGmCmC+GmCmUmC+AmGmCmA+Cm |
| | CACC | C |
| 145 | GCCAGGUAAGUAUC | mGmCmCmAmGmGmUmAmAmGmUmAmUmCmU+C |
| | UCGCGGCGCCGCUCA | mGmCmG+GmCmGmC+CmGmCmU+CmAmGmC+Am |
| | GCAC | C |
| 146 | GCCAGGUAAGUAUA | mGmCmCmAmGmGmUmAmAmGmUmAmUmAmC+T |
| | CTCGCGGCGCCGCTC | mCmGmC+GmGmCmG+CmCmGmC+TmCmAmG+Cm |
| | AGCA | A |
| 147 | GCCAGGUAAGUAUG | mGmCmCmAmGmGmUmAmAmGmUmAmUmGmA+C |
| | ACUCGCGGCGCCGCU | mUmCmG+CmGmGmC+GmCmCmG+CmUmCmA+Gm |
| | CAGC | C |
| 148 | GCCAGGUAAGUAUC | mGmCmCmAmGmGmUmAmAmGmUmAmUmCmG+A |
| | GACUCGCGGCGCCGC | mCmUmC+GmCmGmG+CmGmCmC+GmCmUmC+Am |
| | UCAG | G |
| 149 | GCCAGGUAAGUAUC | mGmCmCmAmGmGmUmAmAmGmUmAmUmCmC+G |
| | CGACUCGCGGCGCCG | mAmCmU+CmGmCmG+GmCmGmC+CmGmCmU+Cm |
| | CUCA | A |
| 150 | GCCAGGUAAGUAUA | mGmCmCmAmGmGmUmAmAmGmUmAmUmAmG+G |
| | GGCCUCGGGCCGAC | mCmCmU+CmGmGmG+CmCmGmA+CmUmCmG+Cm |
| | UCGCG | G |
| 151 | GCCAGGUAAGUAUG | mGmCmCmAmGmGmUmAmAmGmUmAmUmGmA+G |
| | AGGCCTCGGGCCGAC | mGmCmC+TmCmGmG+GmCmCmG+AmCmUmC+Gm |
| | UCGC | C |
| 152 | GCCAGGUAAGUAUG | mGmCmCmAmGmGmUmAmAmGmUmAmUmGmG+A |
| | GAGGCCUCGGGCCG | mGmGmC+CmUmCmG+GmGmCmC+GmAmCmU+Cm |
| | ACUCG | G |
| 153 | GCCAGGUAAGUAUC | mGmCmCmAmGmGmUmAmAmGmUmAmUmCmG+G |
| | GGAGGCCUCGGGCC | mAmGmG+CmCmUmC+GmGmGmC+CmGmAmC+Tm |
| | GACTC | C |
| 154 | GCCAGGUAAGUAUC | mGmCmCmAmGmGmUmAmAmGmUmAmUmCmC+G |
| | CGGAGGCCUCGGGC | mGmAmG+GmCmCmU+CmGmGmG+CmCmGmA+Cm |
| | CGACU | U |
| 155 | GCCAGGUAAGUAUA | mGmCmCmAmGmGmUmAmAmGmUmAmUmAmG+T |
| | GTCCCCGGAGGCCTC | mCmCmC+CmGmGmA+GmGmCmC+TmCmGmG+Gm |
| | GGGC | C |
| 156 | GCCAGGUAAGUAUC | mGmCmCmAmGmGmUmAmAmGmUmAmUmCmA+G |
| | AGUCCCCGGAGGCC | mUmCmC+CmCmGmG+AmGmGmC+CmUmCmG+Gm |
| | UCGGG | G |
| 157 | GCCAGGUAAGUAUG | mGmCmCmAmGmGmUmAmAmGmUmAmUmGmC+A |
| | CAGUCCCCGGAGGCC | mGmUmC+CmCmCmG+GmAmGmG+CmCmUmC+Gm |
| | UCGG | G |
| 158 | GCCAGGUAAGUAUG | mGmCmCmAmGmGmUmAmAmGmUmAmUmGmG+C |
| | GCAGUCCCCGGAGG | mAmGmU+CmCmCmC+GmGmAmG+GmCmCmU+Cm |
| | CCUCG | G |
| 159 | GCCAGGUAAGUAUC | mGmCmCmAmGmGmUmAmAmGmUmAmUmCmG+G |
| | GGCAGTCCCCGGAGG | mCmAmG+TmCmCmC+CmGmGmA+GmGmCmC+Tm |
| | CCTC | C |
| 160 | GCCAGGUAAGUAUA | mGmCmCmAmGmGmUmAmAmGmUmAmUmAmC+G |
| | CGGCAGUCCCCGGA | mGmCmA+GmUmCmC+CmCmGmG+AmGmGmC+Cm |
| | GGCCU | U |
| 161 | GCCAGGUAAGUAUC | mGmCmCmAmGmGmUmAmAmGmUmAmUmCmA+C |
| | ACGGCAGUCCCCGG | mGmGmC+AmGmUmC+CmCmCmG+GmAmGmG+Cm |
| | AGGCC | C |
| 162 | GCCAGGUAAGUAUG | mGmCmCmAmGmGmUmAmAmGmUmAmUmGmC+A |
| | CACGGCAGUCCCCGG | mCmGmG+CmAmGmU+CmCmCmC+GmGmAmG+Gm |
| | AGGC | C |
| 163 | GCCAGGUAAGUAUG | mGmCmCmAmGmGmUmAmAmGmUmAmUmGmG+C |
| | GCACGGCAGTCCCCG | mAmCmG+GmCmAmG+TmCmCmC+CmGmGmA+Gm |
| | GAGG | G |
| 164 | GCCAGGUAAGUAUC | mGmCmCmAmGmGmUmAmAmGmUmAmUmCmG+G |
| | GGCACGGCAGUCCCC | mCmAmC+GmGmCmA+GmUmCmC+CmCmGmG+Am |
| | GGAG | G |
| 165 | GCCAGGUAAGUAUC | mGmCmCmAmGmGmUmAmAmGmUmAmUmCmC+G |
| | CGGCACGGCAGUCCC | mGmCmA+CmGmGmC+AmGmUmC+CmCmCmG+Gm |
| | CGGA | A |
| 166 | GCCAGGUAAGUAUU | mGmCmCmAmGmGmUmAmAmGmUmAmUmUmC+C |
| | CCCGCCCGGCACGGC | mCmGmC+CmCmGmG+CmAmCmG+GmCmAmG+Tm |
| | AGTC | C |
| 167 | GCCAGGUAAGUAUC | mGmCmCmAmGmGmUmAmAmGmUmAmUmCmU+C |
| | UCCCGCCCGGCACGG | mCmCmG+CmCmCmG+GmCmAmC+GmGmCmA+Gm |
| | CAGU | U |
| 168 | GCCAGGUAAGUAUU | mGmCmCmAmGmGmUmAmAmGmUmAmUmUmC+T |
| | CTCCCGCCCGGCACG | mCmCmC+GmCmCmC+GmGmCmA+CmGmGmC+Am |
| | GCAG | G |
| 169 | GCCAGGUAAGUAUG | mGmCmCmAmGmGmUmAmAmGmUmAmUmGmU+C |
| | UCUCCCGCCCGGCAC | mUmCmC+CmGmCmC+CmGmGmC+AmCmGmG+Cm |
| | GGCA | A |
| 170 | GCCAGGUAAGUAUU | mGmCmCmAmGmGmUmAmAmGmUmAmUmUmG+G |
| | GGCGGTCUCCCGCCC | mCmGmG+TmCmUmC+CmCmGmC+CmCmGmG+Cm |
| | GGCA | A |
| 171 | GCCAGGUAAGUAUA | mGmCmCmAmGmGmUmAmAmGmUmAmUmAmU+G |
| | UGGCGGUCUCCCGCC | mGmCmG+GmUmCmU+CmCmCmG+CmCmCmG+Gm |
| | CGGC | C |
| 172 | GCCAGGUAAGUAUC | mGmCmCmAmGmGmUmAmAmGmUmAmUmCmA+T |
| | ATGGCGGUCTCCCGC | mGmGmC+GmGmUmC+TmCmCmC+GmCmCmC+Gm |
| | CCGG | G |
| 173 | GCCAGGUAAGUAUC | mGmCmCmAmGmGmUmAmAmGmUmAmUmCmC+A |
| | CAUGGCGGUCUCCC | mUmGmG+CmGmGmU+CmUmCmC+CmGmCmC+Cm |
| | GCCCG | G |
| 174 | GCCAGGUAAGUAUG | mGmCmCmAmGmGmUmAmAmGmUmAmUmGmC+C |
| | CCAUGGCGGTCUCCC | mAmUmG+GmCmGmG+TmCmUmC+CmCmGmC+Cm |
| | GCCC | C |
| 175 | GCCAGGUAAGUAUC | mGmCmCmAmGmGmUmAmAmGmUmAmUmCmG+C |
| | GCCAUGGCGGUCUC | mCmAmU+GmGmCmG+GmUmCmU+CmCmCmG+Cm |
| | CCGCC | C |
| 176 | GCCAGGUAAGUAUU | mGmCmCmAmGmGmUmAmAmGmUmAmUmUmC+G |
| | CGCCATGGCGGUCTC | mCmCmA+TmGmGmC+GmGmUmC+TmCmCmC+Gm |
| | CCGC | C |
| 177 | GCCAGGUAAGUAUG | mGmCmCmAmGmGmUmAmAmGmUmAmUmGmU+C |
| | UCGCCAUGGCGGUC | mGmCmC+AmUmGmG+CmGmGmU+CmUmCmC+Cm |
| | UCCCG | G |
| 178 | GCCAGGUAAGUAUG | mGmCmCmAmGmGmUmAmAmGmUmAmUmGmG+T |
| | GTCGCCAUGGCGGTC | mCmGmC+CmAmUmG+GmCmGmG+TmCmUmC+Cm |
| | UCCC | C |
| 179 | GCCAGGUAAGUAUG | mGmCmCmAmGmGmUmAmAmGmUmAmUmGmG+G |
| | GGUCGCCAUGGCGG | mUmCmG+CmCmAmU+GmGmCmG+GmUmCmU+Cm |
| | UCUCC | C |
| 180 | GCCAGGUAAGUAUA | mGmCmCmAmGmGmUmAmAmGmUmAmUmAmG+G |
| | GGGUCGCCATGGCG | mGmUmC+GmCmCmA+TmGmGmC+GmGmUmC+Tm |
| | GUCTC | C |
| 181 | GCCAGGUAAGUAUC | mGmCmCmAmGmGmUmAmAmGmUmAmUmCmA+G |
| | AGGGUCGCCAUGGC | mGmGmU+CmGmCmC+AmUmGmG+CmGmGmU+Cm |
| | GGUCU | U |
| 182 | GCCAGGUAAGUAUC | mGmCmCmAmGmGmUmAmAmGmUmAmUmCmC+A |
| | CAGGGTCGCCAUGGC | mGmGmG+TmCmGmC+CmAmUmG+GmCmGmG+Tm |
| | GGTC | C |
| 183 | GCCAGGUAAGUAUU | mGmCmCmAmGmGmUmAmAmGmUmAmUmUmC+C |
| | CCAGGGUCGCCAUG | mAmGmG+GmUmCmG+CmCmAmU+GmGmCmG+G |
| | GCGGU | mU |
| 184 | GCCAGGUAAGUAUU | mGmCmCmAmGmGmUmAmAmGmUmAmUmUmU+C |
| | UCCAGGGUCGCCATG | mCmAmG+GmGmUmC+GmCmCmA+TmGmGmC+Gm |
| | GCGG | G |
| 185 | GCCAGGUAAGUAUU | mGmCmCmAmGmGmUmAmAmGmUmAmUmUmU+T |
| | UTCCAGGGUCGCCAU | mCmCmA+GmGmGmU+CmGmCmC+AmUmGmG+Cm |
| | GGCG | G |
| 186 | GCCAGGUAAGUAUU | mGmCmCmAmGmGmUmAmAmGmUmAmUmUmU+T |
| | UTUCCAGGGTCGCCA | mUmCmC+AmGmGmG+TmCmGmC+CmAmUmG+Gm |
| | UGGC | C |
| 187 | GCCAGGUAAGUAUC | mGmCmCmAmGmGmUmAmAmGmUmAmUmCmU+T |
| | UTUUCCAGGGUCGCC | mUmUmC+CmAmGmG+GmUmCmG+CmCmAmU+Gm |
| | AUGG | G |
| 188 | GCCAGGUAAGUAUG | mGmCmCmAmGmGmUmAmAmGmUmAmUmGmC+T |
| | CTUUUCCAGGGUCGC | mUmUmU+CmCmAmG+GmGmUmC+GmCmCmA+Tm |
| | CATG | G |
| 189 | GCCAGGUAAGUAUA | mGmCmCmAmGmGmUmAmAmGmUmAmUmAmG+C |
| | GCUUUTCCAGGGUC | mUmUmU+TmCmCmA+GmGmGmU+CmGmCmC+Am |
| | GCCAU | U |
| 190 | GCCAGGUAAGUAUC | mGmCmCmAmGmGmUmAmAmGmUmAmUmCmA+G |
| | AGCUUTUCCAGGGTC | mCmUmU+TmUmCmC+AmGmGmG+TmCmGmC+Cm |
| | GCCA | A |
| 191 | GCCAGGUAAGUAUU | mGmCmCmAmGmGmUmAmAmGmUmAmUmUmC+A |
| | CAGCUTUUCCAGGG | mGmCmU+TmUmUmC+CmAmGmG+GmUmCmG+Cm |
| | UCGCC | C |
| 192 | GCCAGGUAAGUAUA | mGmCmCmAmGmGmUmAmAmGmUmAmUmAmU+C |
| | UCAGCTUUUCCAGG | mAmGmC+TmUmUmU+CmCmAmG+GmGmUmC+Gm |
| | GUCGC | C |
| 193 | GCCAGGUAAGUAUC | mGmCmCmAmGmGmUmAmAmGmUmAmUmCmA+T |
| | ATCAGCUUUTCCAGG | mCmAmG+CmUmUmU+TmCmCmA+GmGmGmU+Cm |
| | GUCG | G |
| 194 | GCCAGGUAAGUAUU | mGmCmCmAmGmGmUmAmAmGmUmAmUmUmC+A |
| | CAUCAGCUUTUCCAG | mUmCmA+GmCmUmU+TmUmCmC+AmGmGmG+Tm |
| | GGTC | C |
| 195 | GCCAGGUAAGUAUU | mGmCmCmAmGmGmUmAmAmGmUmAmUmUmU+C |
| | UCAUCAGCUTUUCCA | mAmUmC+AmGmCmU+TmUmUmC+CmAmGmG+Gm |
| | GGGU | U |
| 196 | GCCAGGUAAGUAUC | mGmCmCmAmGmGmUmAmAmGmUmAmUmCmU+T |
| | UTCAUCAGCTUUUCC | mCmAmU+CmAmGmC+TmUmUmU+CmCmAmG+Gm |
| | AGGG | G |
| 197 | GCCAGGUAAGUAUC | mGmCmCmAmGmGmUmAmAmGmUmAmUmCmC+T |
| | CTUCATCAGCUUUTC | mUmCmA+TmCmAmG+CmUmUmU+TmCmCmA+Gm |
| | CAGG | G |
| 198 | GCCAGGUAAGUAUG | mGmCmCmAmGmGmUmAmAmGmUmAmUmGmC+C |
| | CCUUCAUCAGCUUTU | mUmUmC+AmUmCmA+GmCmUmU+TmUmCmC+Am |
| | CCAG | G |
| 199 | GCCAGGUAAGUAUG | mGmCmCmAmGmGmUmAmAmGmUmAmUmGmG+C |
| | GCCUUCAUCAGCUTU | mCmUmU+CmAmUmC+AmGmCmU+TmUmUmC+Cm |
| | UCCA | A |
| 200 | GCCAGGUAAGUAUA | mGmCmCmAmGmGmUmAmAmGmUmAmUmAmG+G |
| | GGCCUTCAUCAGCTU | mCmCmU+TmCmAmU+CmAmGmC+TmUmUmU+Cm |
| | UUCC | C |
| 201 | GCCAGGUAAGUAUA | mGmCmCmAmGmGmUmAmAmGmUmAmUmAmA+G |
| | AGGCCTUCATCAGCU | mGmCmC+TmUmCmA+TmCmAmG+CmUmUmU+Tm |
| | UUTC | C |
| 202 | GCCAGGUAAGUAUG | mGmCmCmAmGmGmUmAmAmGmUmAmUmGmA+A |
| | AAGGCCUUCAUCAG | mGmGmC+CmUmUmC+AmUmCmA+GmCmUmU+Tm |
| | CUUTU | U |
| 203 | GCCAGGUAAGUAUC | mGmCmCmAmGmGmUmAmAmGmUmAmUmCmG+A |
| | GAAGGCCUUCAUCA | mAmGmG+CmCmUmU+CmAmUmC+AmGmCmU+Tm |
| | GCUTU | U |
| 204 | GCCAGGUAAGUAUU | mGmCmCmAmGmGmUmAmAmGmUmAmUmUmC+G |
| | CGAAGGCCUTCAUCA | mAmAmG+GmCmCmU+TmCmAmU+CmAmGmC+Tm |
| | GCTU | U |
| 205 | GCCAGGUAAGUAUA | mGmCmCmAmGmGmUmAmAmGmUmAmUmAmC+T |
| | CTCGAAGGCCUUCAU | mCmGmA+AmGmGmC+CmUmUmC+AmUmCmA+Gm |
| | CAGC | C |
| 206 | GCCAGGUAAGUAUG | mGmCmCmAmGmGmUmAmAmGmUmAmUmGmA+C |
| | ACUCGAAGGCCUUC | mUmCmG+AmAmGmG+CmCmUmU+CmAmUmC+Am |
| | AUCAG | G |
| 207 | GCCAGGUAAGUAUG | mGmCmCmAmGmGmUmAmAmGmUmAmUmGmG+A |
| | GACUCGAAGGCCUTC | mCmUmC+GmAmAmG+GmCmCmU+TmCmAmU+Cm |
| | AUCA | A |
| 20 | GCCAGGUAAGUAUG | mGmCmCmAmGmGmUmAmAmGmUmAmUmGmG+G |
| | GGACUCGAAGGCCT | mAmCmU+CmGmAmA+GmGmCmC+TmUmCmA+Tm |
| | UCATC | C |
| 209 | GCCAGGUAAGUAUA | mGmCmCmAmGmGmUmAmAmGmUmAmUmAmG+G |
| | GGGACTCGAAGGCC | mGmAmC+TmCmGmA+AmGmGmC+CmUmUmC+Am |
| | UUCAU | U |
| 210 | GCCAGGUAAGUAUG | mGmCmCmAmGmGmUmAmAmGmUmAmUmGmA+G |
| | AGGGACUCGAAGGC | mGmGmA+CmUmCmG+AmAmGmG+CmCmUmU+Cm |
| | CUUCA | A |
| 211 | GCCAGGUAAGUAUU | mGmCmCmAmGmGmUmAmAmGmUmAmUmUmG+A |
| | GAGGGACUCGAAGG | mGmGmG+AmCmUmC+GmAmAmG+GmCmCmU+Tm |
| | CCUTC | C |
| 212 | GCCAGGUAAGUAUU | mGmCmCmAmGmGmUmAmAmGmUmAmUmUmU+G |
| | UGAGGGACUCGAAG | mAmGmG+GmAmCmU+CmGmAmA+GmGmCmC+Tm |
| | GCCTU | U |
| 213 | GCCAGGUAAGUAUC | mGmCmCmAmGmGmUmAmAmGmUmAmUmCmU+T |
| | UTGAGGGACTCGAA | mGmAmG+GmGmAmC+TmCmGmA+AmGmGmC+Cm |
| | GGCCU | U |
| 214 | GCCAGGUAAGUAUA | mGmCmCmAmGmGmUmAmAmGmUmAmUmAmC+T |
| | CTUGAGGGACUCGA | mUmGmA+GmGmGmA+CmUmCmG+AmAmGmG+C |
| | AGGCC | mC |
| 215 | GCCAGGUAAGUAUG | mGmCmCmAmGmGmUmAmAmGmUmAmUmGmA+C |
| | ACUUGAGGGACUCG | mUmUmG+AmGmGmG+AmCmUmC+GmAmAmG+G |
| | AAGGC | mC |
| 216 | GCCAGGUAAGUAUG | mGmCmCmAmGmGmUmAmAmGmUmAmUmGmG+A |
| | GACUUGAGGGACUC | mCmUmU+GmAmGmG+GmAmCmU+CmGmAmA+G |
| | GAAGG | mG |
| 217 | GCCAGGUAAGUAUA | mGmCmCmAmGmGmUmAmAmGmUmAmUmAmG+G |
| | GGACUTGAGGGACTC | mAmCmU+TmGmAmG+GmGmAmC+TmCmGmA+Am |
| | GAAG | G |
| 218 | GCCAGGUAAGUAUA | mGmCmCmAmGmGmUmAmAmGmUmAmUmAmA+G |
| | AGGACTUGAGGGAC | mGmAmC+TmUmGmA+GmGmGmA+CmUmCmG+Am |
| | UCGAA | A |
| 219 | GCCAGGUAAGUAUG | mGmCmCmAmGmGmUmAmAmGmUmAmUmGmA+A |
| | AAGGACUUGAGGGA | mGmGmA+CmUmUmG+AmGmGmG+AmCmUmC+G |
| | CUCGA | mA |
| 220 | GCCAGGUAAGUAUG | mGmCmCmAmGmGmUmAmAmGmUmAmUmGmG+A |
| | GAAGGACUUGAGGG | mAmGmG+AmCmUmU+GmAmGmG+GmAmCmU+C |
| | ACUCG | mG |
| 221 | GCCAGGUAAGUAUU | mGmCmCmAmGmGmUmAmAmGmUmAmUmUmG+G |
| | GGAAGGACUTGAGG | mAmAmG+GmAmCmU+TmGmAmG+GmGmAmC+Tm |
| | GACTC | C |
| 222 | GCCAGGUAAGUAUC | mGmCmCmAmGmGmUmAmAmGmUmAmUmCmU+G |
| | UGGAAGGACTUGAG | mGmAmA+GmGmAmC+TmUmGmA+GmGmGmA+C |
| | GGACU | mU |
| 223 | GCCAGGUAAGUAUG | mGmCmCmAmGmGmUmAmAmGmUmAmUmGmC+T |
| | CTGGAAGGACUUGA | mGmGmA+AmGmGmA+CmUmUmG+AmGmGmG+A |
| | GGGAC | mC |
| 224 | GCCAGGUAAGUAUU | mGmCmCmAmGmGmUmAmAmGmUmAmUmUmG+C |
| | GCUGGAAGGACUUG | mUmGmG+AmAmGmG+AmCmUmU+GmAmGmG+G |
| | AGGGA | mA |
| 225 | GCCAGGUAAGUAUC | mGmCmCmAmGmGmUmAmAmGmUmAmUmCmU+G |
| | UGCUGGAAGGACUT | mCmUmG+GmAmAmG+GmAmCmU+TmGmAmG+G |
| | GAGGG | mG |
| 226 | GCCAGGUAAGUAUG | mGmCmCmAmGmGmUmAmAmGmUmAmUmGmC+T |
| | CTGCUGGAAGGACTU | mGmCmU+GmGmAmA+GmGmAmC+TmUmGmA+G |
| | GAGG | mG |
| 227 | GCCAGGUAAGUAUU | mGmCmCmAmGmGmUmAmAmGmUmAmUmUmG+C |
| | GCUGCTGGAAGGAC | mUmGmC+TmGmGmA+AmGmGmA+CmUmUmG+A |
| | UUGAG | mG |
| 228 | GUCCAUCUUGGACC | mGmU+CmCmAmU+CmUmUmG+GmAmCmC+CmGm |
| | CGUCCCGCCAGGUA | UmC+CmCmGmCmCmAmGmGmUmAmAmGmUmAm |
| | AGUAU | U |
| 229 | CGGCCGTCCATCUUG | mCmG+GmCmCmG+TmCmCmA+TmCmUmU+GmGm |
| | GACCCGCCAGGUAA | AmC+CmCmGmCmCmAmGmGmUmAmAmGmUmAm |
| | GUAU | U |
| 230 | CUGAGCGGCCGUCC | mCmU+GmAmGmC+GmGmCmC+GmUmCmC+AmUm |
| | AUCUTGGCCAGGUA | CmU+TmGmGmCmCmAmGmGmUmAmAmGmUmAm |
| | AGUAU | U |
| 231 | AGAACCTGAGCGGCC | mAmG+AmAmCmC+TmGmAmG+CmGmGmC+CmGm |
| | GUCCAGCCAGGUAA | UmC+CmAmGmCmCmAmGmGmUmAmAmGmUmAm |
| | GUAU | U |
| 232 | AAAGCAGAACCUGA | mAmA+AmGmCmA+GmAmAmC+CmUmGmA+GmC |
| | GCGGCCGCCAGGUA | mGmG+CmCmGmCmCmAmGmGmUmAmAmGmUmA |
| | AGUAU | mU |
| 233 | AGGUAAAAGCAGAA | mAmG+GmUmAmA+AmAmGmC+AmGmAmA+CmC |
| | CCUGAGGCCAGGUA | mUmG+AmGmGmCmCmAmGmGmUmAmAmGmUmA |
| | AGUAU | mU |
| 234 | GCCGCAGGUAAAAG | mGmC+CmGmCmA+GmGmUmA+AmAmAmG+CmA |
| | CAGAACGCCAGGUA | mGmA+AmCmGmCmCmAmGmGmUmAmAmGmUmA |
| | AGUAU | mU |
| 235 | UCTGGGCCGCAGGU | mUmC+TmGmGmG+CmCmGmC+AmGmGmU+AmAm |
| | AAAAGCGCCAGGUA | AmA+GmCmGmCmCmAmGmGmUmAmAmGmUmAm |
| | AGUAU | U |
| 236 | UCGCGGCGCCGCUCA | mUmC+GmCmGmG+CmGmCmC+GmCmUmC+AmGm |
| | GCACCGCCAGGUAA | CmA+CmCmGmCmCmAmGmGmUmAmAmGmUmAm |
| | GUAU | U |
| 237 | CCGACUCGCGGCGCC | mCmC+GmAmCmU+CmGmCmG+GmCmGmC+CmGm |
| | GCUCAGCCAGGUAA | CmU+CmAmGmCmCmAmGmGmUmAmAmGmUmAm |
| | GUAU | U |
| 238 | CCGGAGGCCUCGGG | mCmC+GmGmAmG+GmCmCmU+CmGmGmG+CmCm |
| | CCGACUGCCAGGUA | GmA+CmUmGmCmCmAmGmGmUmAmAmGmUmAm |
| | AGUAU | U |
| 239 | CGGCAGTCCCCGGAG | mCmG+GmCmAmG+TmCmCmC+CmGmGmA+GmGm |
| | GCCTCGCCAGGUAAG | CmC+TmCmGmCmCmAmGmGmUmAmAmGmUmAm |
| | UAU | U |
| 240 | CGGCACGGCAGUCCC | mCmG+GmCmAmC+GmGmCmA+GmUmCmC+CmCm |
| | CGGAGGCCAGGUAA | GmG+AmGmGmCmCmAmGmGmUmAmAmGmUmAm |
| | GUAU | U |
| 241 | GUCUCCCGCCCGGCA | mGmU+CmUmCmC+CmGmCmC+CmGmGmC+AmCm |
| | CGGCAGCCAGGUAA | GmG+CmAmGmCmCmAmGmGmUmAmAmGmUmAm |
| | GUAU | U |
| 242 | GCCAUGGCGGTCUCC | mGmC+CmAmUmG+GmCmGmG+TmCmUmC+CmCm |
| | CGCCCGCCAGGUAA | GmC+CmCmGmCmCmAmGmGmUmAmAmGmUmAm |
| | GUAU | U |
| 243 | GGGUCGCCAUGGCG | mGmG+GmUmCmG+CmCmAmU+GmGmCmG+GmU |
| | GUCUCCGCCAGGUA | mCmU+CmCmGmCmCmAmGmGmUmAmAmGmUmA |
| | AGUAU | mU |
| 244 | UUCCAGGGUCGCCAT | mUmU+CmCmAmG+GmGmUmC+GmCmCmA+TmGm |
| | GGCGGGCCAGGUAA | GmC+GmGmGmCmCmAmGmGmUmAmAmGmUmAm |
| | GUAU | U |
| 245 | AGCUUUTCCAGGGU | mAmG+CmUmUmU+TmCmCmA+GmGmGmU+CmGm |
| | CGCCAUGCCAGGUA | CmC+AmUmGmCmCmAmGmGmUmAmAmGmUmAm |
| | AGUAU | U |
| 246 | UCAUCAGCUUTUCCA | mUmC+AmUmCmA+GmCmUmU+TmUmCmC+AmGm |
| | GGGTCGCCAGGUAA | GmG+TmCmGmCmCmAmGmGmUmAmAmGmUmAm |
| | GUAU | U |
| 247 | GGCCUUCAUCAGCUT | mGmG+CmCmUmU+CmAmUmC+AmGmCmU+TmUm |
| | UUCCAGCCAGGUAA | UmC+CmAmGmCmCmAmGmGmUmAmAmGmUmAm |
| | GUAU | U |
| 248 | UCGAAGGCCUTCAUC | mUmC+GmAmAmG+GmCmCmU+TmCmAmU+CmAm |
| | AGCTUGCCAGGUAA | GmC+TmUmGmCmCmAmGmGmUmAmAmGmUmAm |
| | GUAU | U |
| 249 | GGGACUCGAAGGCC | mGmG+GmAmCmU+CmGmAmA+GmGmCmC+TmUm |
| | TUCATCGCCAGGUAA | CmA+TmCmGmCmCmAmGmGmUmAmAmGmUmAm |
| | GUAU | U |
| 250 | CUTGAGGGACTCGAA | mCmU+TmGmAmG+GmGmAmC+TmCmGmA+AmGm |
| | GGCCUGCCAGGUAA | GmC+CmUmGmCmCmAmGmGmUmAmAmGmUmAm |
| | GUAU | U |
| 251 | AAGGACTUGAGGGA | mAmA+GmGmAmC+TmUmGmA+GmGmGmA+CmU |
| | CUCGAAGCCAGGUA | mCmG+AmAmGmCmCmAmGmGmUmAmAmGmUmA |
| | AGUAU | mU |
| 252 | GCTGGAAGGACUUG | mGmC+TmGmGmA+AmGmGmA+CmUmUmG+AmG |
| | AGGGACGCCAGGUA | mGmG+AmCmGmCmCmAmGmGmUmAmAmGmUmA |
| | AGUAU | mU |
| 253 | GCCAGGUAAGUAUG | mGmCmCmAmGmGmUmAmAmGmUmAmUmGmU+C |
| | UCAGAAAUACACAA | mAmGmA+AmAmUmA+CmAmCmA+AmUmAmC+C |
| | UACCU | mU |
| 254 | GUCAGAAAUACACA | mGmU+CmAmGmA+AmAmUmA+CmAmCmA+AmU |
| | AUACCUGCCAGGUA | mAmC+CmUmGmCmCmAmGmGmUmAmAmGmUmA |
| | AGUAU | mU |

[0085] In an embodiment, the bifunctional oligonucleotide has a sequence selected from a sequence provided in Table 3. In Tables 3, an “in” placed before a nucleotide refers to a 2′OMe modification, a “+” placed before a nucleotide refers to a locked nucleic acid (LNA), a “i2MOE” placed before a nucleotide refers to a 2′-O-methoxy ethyl modification, a “*” placed before a nucleotide refers to a phosphothiorate modification, and a “32MOE” placed before a terminal nucleotide refers to 2′, 3′-O-methoxy ethyl modification. In an embodiment, the bifunctional oligonucleotide comprises a sequence with at least 75%, 80%, 85%, 90%, 95%, 99% or more sequence identity with a nucleotide selected from SEQ TD NOs: 255-294, or a variant or fragment thereof. In an embodiment, the bifunctional oligonucleotide comprises the sequence GCCAGGUAAGUAU (SEQ TD NO: 004). In an embodiment, the bifunctional oligonucleotide comprises a sequence with at least 75%, 80%, 85%, 90%, 95%, 99%, or more sequence identity with SEQ TD NO: 004, or a variant or fragment thereof.

TABLE 3
Exemplary bifunctional oligonucleotides with reference sequences

| SEQ ID | | |
|---|---|---|
| NO. | Reference sequence | Sequence |
| 255 | GCCAGGUAAGUAUA | mG*mC*mC*mA*mGmGmUmAmAmGmUmAmUmAm |
| | AAAGCAGAACCUGA | A+AmAmGmC+AmGmAmA+CmCmUmG+AmGmCmG |
| | GCGGC | +GmC |
| 256 | GCCAGGUAAGUAUA | mGmCmCmAmGmGmUmAmAmGmUmAmUmAmA+A |
| | AAAGCAGAACCUGA | mAmGmC+AmGmAmA+CmCmUmG+AmG*mC*mG*+ |
| | GCGGC | G*mC |
| 257 | GCCAGGUAAGUAUA | mG*mC*mC*mA*mGmGmUmAmAmGmUmAmUmAm |
| | AAAGCAGAACCUGA | A+AmAmGmC+AmGmAmA+CmCmUmG+AmG*mC* |
| | GCGGC | mG*+G*mC |
| 258 | GCCAGGUAAGUAUA | mGmCmCmAmGmGmUmAmAmGmUmAmU/i2MOErA |
| | AAAGCAGAACCUGA | //i2MOErA/+A/i2MOErA//i2MOErG//i2MOErC/+A/ |
| | GCGGC | i2MOErG//i2MOErA//i2MOErA/+C/i2MOErC//ii2MOErT// |
| | | i2MOErG/+A/i2MOErG/*/i2MOErC/*/i2MOErG/*+G*/ |
| | | 32MOErC/ |
| 259 | GCCAGGUAAGUAUA | mG*mC*mC*mA*mGmGmUmAmAmGmUmAmU/ |
| | AAAGCAGAACCUGA | i2MOErA//i2MOErA/+A/i2MOErA//i2MOErG//i2MOErC/ |
| | GCGGC | +A/i2MOErG//i2MOErA//i2MOErA/+C/i2MOErC// |
| | | i2MOErT//i2MOErG/+A/i2MOErG/*/i2MOErC/*/i2MOErG/*+G |
| | | */32MOErC/ |
| 260 | GCCAGGUAAGUAUA | /52MOErG/*+C*/i2MOErC/*+A*/i2MOErG/+G/ |
| | AAAGCAGAACCUGA | i2MOErT/+A/i2MOErA/+G/i2MOErT//i2MOErA//i2MOErT/ |
| | GCGGC | mAmA+AmAmGmC+AmGmAmA+CmCmUmG+AmGmCm |
| | | G+GmC |
| 261 | GCCAGGUAAGUAUA | /52MOErG/*+C*/i2MOErC/*+A*/i2MOErG/+G/ |
| | AAAGCAGAACCUGA | i2MOErT/+A/i2MOErA/+G/i2MOErT//i2MOErA//i2MOErT/ |
| | GCGGC | mAmA+AmAmGmC+AmGmAmA+CmCmUmG+AmG*mC |
| | | *mG*+G*mC |
| 262 | GCCAGGUAAGUAUA | /52MOErG/*+C*/i2MOErC/*+A*/i2MOErG/+G/ |
| | AAAGCAGAACCUGA | i2MOErT/+A/i2MOErA/+G/i2MOErT//i2MOErA//i2MOErT// |
| | GCGGC | i2MOErA//i2MOErA/+A/i2MOErA//i2MOErG//i2MOErC/ |
| | | +A/i2MOErG//i2MOErA//i2MOErA/+C/i2MOErC// |
| | | i2MOErT//i2MOErG/+A/i2MOErG/*/i2MOErC/*/i2MOErG/ |
| | | *+G*/32MOErC/ |
| 263 | GCCAGGUAAGUAUU | mG*mC*mC*mA*mGmGmUmAmAmGmUmAmUmUm |
| | UCCAGGGUCGCCAT | U+CmCmAmG+GmGmUmC+GmCmCmA+TmGmGmC |
| | GGCGG | +GmG |
| 264 | GCCAGGUAAGUAUU | mGmCmCmAmGmGmUmAmAmGmUmAmUmUmU+C |
| | UCCAGGGUCGCCAT | mCmAmG+GmGmUmC+GmCmCmA+TmG*mG*mC*+ |
| | GGCGG | G*mG |
| 265 | GCCAGGUAAGUAUU | mG*mC*mC*mA*mGmGmUmAmAmGmUmAmUmUm |
| | UCCAGGGUCGCCAT | U+CmCmAmG+GmGmUmC+GmCmCmA+TmG*mG*m |
| | GGCGG | C*+G*mG |
| 266 | GCCAGGUAAGUAUU | mGmCmCmAmGmGmUmAmAmGmUmAmU/i2MOErT |
| | UCCAGGGUCGCCAT | //i2MOErT/+C/i2MOErC//i2MOErA//i2MOErG/+G/ |
| | GGCGG | i2MOErG//i2MOErT//i2MOErC/+G/i2MOErC//i2MOErC// |
| | | i2MOErA/+T/i2MOErG/*/i2MOErG/*/i2MOErC/*+G*/ |
| | | 32MOErG/ |
| 267 | GCCAGGUAAGUAUU | mG*mC*mC*mA*mGmGmUmAmAmGmUmAmU/ |
| | UCCAGGGUCGCCAT | i2MOErT//i2MOET/+C/i2MOErC//i2MOErA//i2MOErG/+G/ |
| | GGCGG | i2MOErG//i2MOErT//i2MOErC/+G/i2MOErC//i2MOErC/ |
| | | /i2MOErA/+T/i2MOErG/*/i2MOErG/*/i2MOErC/*+G*/ |
| | | 32MOErG/ |
| 268 | GCCAGGUAAGUAUU | /52MOErG/*+C*/i2MOErC/*+A*/i2MOErG/+G/ |
| | UCCAGGGUCGCCAT | i2MOErT/+A/i2MOErA/+G/i2MOErT//i2MOErA//i2MOErT/ |
| | GGCGG | mUmU+CmCmAmG+GmGmUmC+GmCmCmA+TmGmGm |
| | | C+GmG |
| 269 | GCCAGGUAAGUAUU | /52MOErG/*+C*/i2MOErC/*+A*/i2MOErG/+G/ |
| | UCCAGGGUCGCCAT | i2MOErT/+A/i2MOErA/+G/i2MOErT//i2MOErA//i2MOErT/ |
| | GGCGG | mUmU+CmCmAmG+GmGmUmC+GmCmCmA+TmG*mG* |
| | | mC*+G*mG |
| 270 | GCCAGGUAAGUAUU | /52MOErG/*+C*/i2MOErC/*+A*/i2MOErG/+G/ |
| | UCCAGGGUCGCCAT | i2MOErT/+A/i2MOErA/+G/i2MOErT//i2MOErA//i2MOErT// |
| | GGCGG | i2MOErT//i2MOErT/+C/i2MOErC//i2MOErA//i2MOErG/+G/ |
| | | i2MOErG//i2MOErT//i2MOErC/+G/i2MOErC//i2MOErC/ |
| | | /i2MOErA/+T/i2MOErG/*/i2MOErG/*/i2MOErC/*+G*/ |
| | | 32MOErG/ |
| 271 | GCCAGGUAAGUAUU | mG*mC*mC*mA*mGmGmUmAmAmGmUmAmUmUm |
| | CAGCUTUUCCAGGG | C+AmGmCmU+TmUmUmC+CmAmGmG+GmUmCmG |
| | UCGCC | +CmC |
| 272 | GCCAGGUAAGUAUU | mGmCmCmAmGmGmUmAmAmGmUmAmUmUmC+A |
| | CAGCUTUUCCAGGG | mGmCmU+TmUmUmC+CmAmGmG+GmU*mC*mG*+ |
| | UCGCC | C*mC |
| 273 | GCCAGGUAAGUAUU | mG*mC*mC*mA*mGmGmUmAmAmGmUmAmUmUm |
| | CAGCUTUUCCAGGG | C+AmGmCmU+TmUmUmC+CmAmGmG+GmU*mC*m |
| | UCGCC | G*+C*mC |
| 274 | GCCAGGUAAGUAUU | mGmCmCmAmGmGmUmAmAmGmUmAmU/i2MOErT |
| | CAGCUTUUCCAGGG | //i2MOErC/+A/i2MOErG//i2MOErC//i2MOErT/+T/ |
| | UCGCC | i2MOErT//i2MOErT//i2MOErC/+C/i2MOErA//i2MOErG// |
| | | i2MOErG/+G/i2MOErT/*/i2MOErC/*/i2MOErG/*+C*/ |
| | | 32MOErC/ |
| 275 | GCCAGGUAAGUAUU | mG*mC*mC*mA*mGmGmUmAmAmGmUmAmU/ |
| | CAGCUTUUCCAGGG | i2MOErT//i2MOErC/+A/i2MOErG//i2MOErC//i2MOErT/+T/ |
| | UCGCC | i2MOErT//i2MOErT//i2MOErC/+C/i2MOErA//i2MOErG// |
| | | i2MOErG/+G/i2MOErT/*/i2MOErC/*/i2MOErG/*+C*/ |
| | | 32MOErC/ |
| 276 | GCCAGGUAAGUAUU | /52MOErG/*+C*/i2MOErC/*+A*/i2MOErG/+G/ |
| | CAGCUTUUCCAGGG | i2MOErT/+A/i2MOErA/+G/i2MOErT//i2MOErA//i2MOErT/ |
| | UCGCC | mUmC+AmGmCmU+TmUmUmC+CmAmGmG+GmUmCm |
| | | G+CmC |
| 277 | GCCAGGUAAGUAUU | /52MOErG/*+C*/i2MOErC/*+A*/i2MOErG/+G/ |
| | CAGCUTUUCCAGGG | i2MOErT/+A/i2MOErA/+G/i2MOErT//i2MOErA//i2MOErT/ |
| | UCGCC | mUmC+AmGmCmU+TmUmUmC+CmAmGmG+GmU*mC* |
| | | mG*+C*mC |
| 278 | GCCAGGUAAGUAUU | /52MOErG/*+C*/i2MOErC/*+A*/i2MOErG/+G/ |
| | CAGCUTUUCCAGGG | i2MOErT/+A/i2MOErA/+G/i2MOErT//i2MOErA//i2MOErT// |
| | UCGCC | i2MOErT//i2MOErC/+A/i2MOErG//i2MOErC//i2MOErT/+T/ |
| | | i2MOErT//i2MOErT//i2MOErC/+C/i2MOErA//i2MOErG// |
| | | i2MOErG/+G/i2MOErT/*/i2MOErC/*/i2MOErG/*+C*/ |
| | | 32MOErC/ |
| 279 | GCCAGGUAAGUAUA | mG*mC*mC*mA*mGmGmUmAmAmGmUmAmUmAm |
| | AGGACTUGAGGGAC | A+GmGmAmC+TmUmGmA+GmGmGmA+CmUmCmG |
| | UCGAA | +AmA |
| 280 | GCCAGGUAAGUAUA | mGmCmCmAmGmGmUmAmAmGmUmAmUmAmA+G |
| | AGGACTUGAGGGAC | mGmAmC+TmUmGmA+GmGmGmA+CmU*mC*mG*+ |
| | UCGAA | A*mA |
| 281 | GCCAGGUAAGUAUA | mG*mC*mC*mA*mGmGmUmAmAmGmUmAmUmAm |
| | AGGACTUGAGGGAC | A+GmGmAmC+TmUmGmA+GmGmGmA+CmU*mC* |
| | UCGAA | mG*+A*mA |
| 282 | GCCAGGUAAGUAUA | mGmCmCmAmGmGmUmAmAmGmUmAmU/i2MOErA |
| | AGGACTUGAGGGAC | //i2MOErA/+G/i2MOErG//i2MOErA//i2MOErC/+T/ |
| | UCGAA | i2MOErT//i2MOErG//i2MOErA/+G/i2MOErG//i2MOErG// |
| | | i2MOErA/+C/i2MOErT/*/i2MOErC/*/i2MOErG/*+A*/ |
| | | 32MOErA/ |
| 283 | GCCAGGUAAGUAUA | mG*mC*mC*mA*mGmGmUmAmAmGmUmAmU/ |
| | AGGACTUGAGGGAC | i2MOErA//i2MOErA/+G/i2MOErG//i2MOErA//i2MOErC/+T/ |
| | UCGAA | i2MOErT//i2MOErG//i2MOErA/+G/i2MOErG//i2MOErG |
| | | //i2MOErA/+C/i2MOErT/*/i2MOErC/*/i2MOErG/*+A*/ |
| | | 32MOErA/ |
| 284 | GCCAGGUAAGUAUA | /52MOErG/*+C*/i2MOErC/*+A*/i2MOErG/+G/ |
| | AGGACTUGAGGGAC | i2MOErT/+A/i2MOErA/+G/i2MOErT//i2MOErA//i2MOErT/ |
| | UCGAA | mAmA+GmGmAmC+TmUmGmA+GmGmGmA+CmUmCm |
| | | G+AmA |
| 285 | GCCAGGUAAGUAUA | /52MOErG/*+C*/i2MOErC/*+A*/i2MOErG/+G/ |
| | AGGACTUGAGGGAC | i2MOErT/+A/i2MOErA/+G/i2MOErT//i2MOErA//i2MOErT/ |
| | UCGAA | mAmA+GmGmAmC+TmUmGmA+GmGmGmA+CmU*mC |
| | | *mG*+A*mA |
| 286 | GCCAGGUAAGUAUA | /52MOErG/*+C*/i2MOErC/*+A*/i2MOErG/+G/ |
| | AGGACTUGAGGGAC | i2MOErT/+A/i2MOErA/+G/i2MOErT//i2MOErA//i2MOErT// |
| | UCGAA | i2MOErA//i2MOErA/+G/i2MOErG//i2MOErA//i2MOErC/+T/ |
| | | i2MOErT//i2MOErG//i2MOErA/+G/i2MOErG//i2MOErG |
| | | //i2MOErA/+C/i2MOErT/*/i2MOErC/*/i2MOErG/*+A*/ |
| | | 32MOErA/ |
| 287 | GCCAGGUAAGUAUU | mG*mC*mC*mA*mGmGmUmAmAmGmUmAmUmUm |
| | UCAUCAGCUTUUCC | U+CmAmUmC+AmGmCmU+TmUmUmC+CmAmGmG |
| | AGGGU | +GmU |
| 288 | GCCAGGUAAGUAUU | mGmCmCmAmGmGmUmAmAmGmUmAmUmUmU+C |
| | UCAUCAGCUTUUCC | mAmUmC+AmGmCmU+TmUmUmC+CmA*mG*mG*+ |
| | AGGGU | G*mU |
| 289 | GCCAGGUAAGUAUU | mG*mC*mC*mA*mGmGmUmAmAmGmUmAmUmUm |
| | UCAUCAGCUTUUCC | U+CmAmUmC+AmGmCmU+TmUmUmC+CmA*mG*m |
| | AGGGU | G*+G*mU |
| 290 | GCCAGGUAAGUAUU | mGmCmCmAmGmGmUmAmAmGmUmAmU/i2MOErT |
| | UCAUCAGCUTUUCC | //i2MOErT/+C/i2MOErA//i2MOErT//i2MOErC/+A/ |
| | AGGGU | i2MOErG//i2MOErC//i2MOErT/+T/i2MOErT//i2MOErT// |
| | | i2MOErC/+C/i2MOErA/*/i2MOErG/*/i2MOErG/*+G*/ |
| | | 32MOErT/ |
| 291 | GCCAGGUAAGUAUU | mG*mC*mC*mA*mGmGmUmAmAmGmUmAmU/ |
| | UCAUCAGCUTUUCC | i2MOErT//i2MOErT/+C/i2MOErA//i2MOErT//i2MOErC/+A/ |
| | AGGGU | i2MOErG//i2MOErC//i2MOErT/+T/i2MOErT//i2MOErT// |
| | | i2MOErC/+C/i2MOErA/*/i2MOErG/*/i2MOErG/*+G*/ |
| | | 32MOErT/ |
| 292 | GCCAGGUAAGUAUU | /52MOErG/*+C*/i2MOErC/*+A*/i2MOErG/+G/ |
| | UCAUCAGCUTUUCC | i2MOErT/+A/i2MOErA/+G/i2MOErT//i2MOErA//i2MOErT/ |
| | AGGGU | mUmU+CmAmUmC+AmGmCmU+TmUmUmC+CmAmGm |
| | | G+GmU |
| 293 | GCCAGGUAAGUAUU | /52MOErG/*+C*/i2MOErC/*+A*/i2MOErG/+G/ |
| | UCAUCAGCUTUUCC | i2MOErT/+A/i2MOErA/+G/i2MOErT//i2MOErA//i2MOErT/ |
| | AGGGU | mU+CmAmUmC+AmGmCmU+TmUmUmC+CmA*mG* |
| | | mUmG*+G*mU |
| 294 | GCCAGGUAAGUAUU | /52MOErG/*+C*/i2MOErC/*+A*/i2MOErG/+G/ |
| | UCAUCAGCUTUUCC | i2MOErT/+A/i2MOErA/+G/i2MOErT//i2MOErA//i2MOErT// |
| | AGGGU | i2MOErT//i2MOErT/+C/i2MOErA//i2MOErT//i2MOErC/+A/ |
| | | i2MOErG//i2MOErC//i2MOErT/+T/i2MOErT//i2MOErT// |
| | | i2MOErC/+C/i2MOErA/*/i2MOErG/*/i2MOErG/*+G*/ |
| | | 32MOErT/ |

[0086] The bifunctional oligonucleotide may comprise nucleotide sequence with at least 75%, 80%, 85%, 90%, 95%, 99%, or more sequence identity with a nucleotide selected from SEQ ID NOs: 100-294, or a variant or fragment thereof. In an embodiment, the bifunctional oligonucleotide comprises nucleotide sequence selected from SEQ ID NOs: 100-294, or a variant or fragment thereof. In an embodiment, the bifunctional oligonucleotide comprises a nucleotide sequence with at least 75%, 80%, 85%, 90%, 95%, 99%, or more sequence identity SEQ ID NO: 004. In an embodiment, the bifunctional oligonucleotide comprises a spliceosome targeting sequence comprising SEQ ID NO: 004.

[0087] The bifunctional oligonucleotide may comprise nucleotide sequence with at least 75%, 80%, 85%, 90%, 95%, 99%, or more sequence identity with a nucleotide selected from SEQ ID NOs: 100-254, or a variant or fragment thereof. In an embodiment, the bifunctional oligonucleotide comprises nucleotide sequence selected from SEQ ID NOs: 100-254, or a variant or fragment thereof. In an embodiment, the bifunctional oligonucleotide comprises a nucleotide sequence with at least 75%, 80%, 85%, 90%, 95%, 99%, or more sequence identity SEQ ID NO: 004. In an embodiment, the bifunctional oligonucleotide comprises a spliceosome targeting sequence comprising SEQ ID NO: 004.

[0088] In an embodiment of Formulas (I), (I-a), (I-b), (I-c), (I-d), (I-e), and (I-f), bases 1-15, 17-19, 21-23, 25-27, 29-31, and 33 comprise a 2′OMe modification; bases 2, 3, 4, and 5 comprise a phosphorothioate modification; and bases 16, 20, 24, 28, and 32 comprise an LNA modification.

[0089] In an embodiment of Formulas (I), (I-a), (I-b), (I-c), (I-d), (I-e), and (I-f), bases 1-15, 17-19, 21-23, 25-27, 29-31, and 33 comprise a 2′OMe modification; bases 30, 31, 32, and 33 comprise a phosphorothioate modification; and bases 16, 20, 24, 28, and 32 comprise an LNA modification.

[0090] In an embodiment of Formulas (I), (I-a), (I-b), (I-c), (I-d), (I-e), and (I-f), bases 1-15, 17-19, 21-23, 25-27, 29-31, and 33 comprise a 2′OMe modification; bases 2, 3, 4, 5, 30, 31, 32, and 33 comprise a phosphorothioate modification; and bases 16, 20, 24, 28, and 32 comprise an LNA modification.

[0091] In an embodiment of Formulas (I), (I-a), (I-b), (I-c), (I-d), (I-e), and (I-f), bases 1-13 comprise a 2′OMe modification; bases 14, 15, 17-19, 21-23, 25-27, 29-31, and 33 comprise a 2′-O-methoxy ethyl modification; bases 30, 31, 32, and 33 comprise a phosphorothioate modification; and bases 16, 20, 24, 28, and 32 comprise an LNA modification.

[0092] In an embodiment of Formulas (I), (I-a), (I-b), (I-c), (I-d), (I-e), and (I-f), bases 1-13 comprise a 2′OMe modification; bases 14, 15, 17-19, 21-23, 25-27, 29-31, and 33 comprise a 2′-O-methoxy ethyl modification; bases 2, 3, 4, 5, 30, 31, 32, and 33 comprise a phosphorothioate modification; and bases 16, 20, 24, 28, and 32 comprise an LNA modification.

[0093] In an embodiment of Formulas (I), (I-a), (I-b), (I-c), (I-d), (I-e), and (I-f), bases 1, 3, 5, 7, 9, and 11-13 comprise 2′-O-methoxy ethyl modification; bases 14, 15, 17-19, 21-23, 25-27, 29-31, and 33 comprise a 2′OMe modification; bases 2, 3, 4, 5, 30, 31, 32, and 33 comprise a phosphorothioate modification; and bases 2, 4, 6, 8, 10, 16, 20, 24, 28, and 32 comprise an LNA modification.

[0094] In an embodiment of Formulas (I), (I-a), (I-b), (I-c), (I-d), (I-e), and (I-f), bases 1, 3, 5, 7, 9, 11-13, 14, 15, 17-19, 21-23, 25-27, 29-31, and 33 comprise a 2′-O-methoxy ethyl modification; bases 2, 3, 4, 5, 30, 31, 32, and 33 comprise a phosphorothioate modification; and bases 2, 4, 6, 8, 10, 16, 20, 24, 28, and 32 comprise an LNA modification.

[0095] In an embodiment of Formulas (I), (I-a), (I-b), (I-c), (I-d), (I-e), and (I-f), bases 1, 3, 5, 7, 9, and 11-13 comprise 2′-O-methoxy ethyl modification; bases 14, 15, 17-19, 21-23, 25-27, 29-31, and 33 comprise a 2′OMe modification; bases 2, 3, 4, and 5 comprise a phosphorothioate modification; and bases 2, 4, 6, 8, 10, 16, 20, 24, 28, and 32 comprise an LNA modification.

[0096] In an embodiment, the bifunctional oligonucleotide comprises a chemical modification that extends the half-life of the bifunctional oligonucleotide in serum, plasma, a cell, or a subject.

[0097] In an embodiment, the bifunctional oligonucleotide has a half-life in serum plasma, a cell, or a subject of at least about 2 hours, e.g., at least about 3 hours, at least about 4 hours, at least about 5 hours, at least about 6 hours, at least about 8 hours, at least about 10 hours, or at least about 12 hours. In some embodiments, the nucleic acid agent modified as described herein has a half-life in liver homogenate (e.g., rat serum) of at least about 2 hours, e.g., at least about 3 hours, at least about 4 hours, at least about 5 hours, at least about 6 hours, at least about 8 hours, at least about 10 hours, at least about 12 hours, or at least about 24 hours

[0098] In an embodiment, the bifunctional oligonucleotide comprises (i) a nucleotide sequence capable of binding to a target sequence comprising an exonic element, e.g., an alternative splice site (e.g., 5′ splice site) within exon 1 of the HTT gene, wherein the nucleotide sequence comprises a plurality of chemical modifications (e.g., a plurality of 2′OMe modifications and LNA modifications) and is between 5 and 35 nucleotides in length; and (b) a nucleotide sequence capable of binding an U1 snRNA comprising a plurality of chemical modifications (e.g., a plurality of 2′OMe modifications).

[0099] In an embodiment, the bifunctional oligonucleotide is capable of one or more of (a) enhancing exonization of the HTT gene (e.g., exon 1) by recruiting the U1 snRNP to a non-canonical 5′ splice site; and (b) potentiating U1 usage/recruitment. In an embodiment, the bifunctional oligonucleotide is capable of (a). In an embodiment, the bifunctional oligonucleotide is capable of (b).

[0100] The compounds (e.g., the bifunctional oligonucleotides) provided herein may contain one or more asymmetric centers and thus occur as racemates and racemic mixtures, single enantiomers, individual diastereomers and diastereomeric mixtures. All such isomeric forms of these compounds are expressly included within the scope. Unless otherwise indicated when a compound is named or depicted by a structure without specifying the stereochemistry and has one or more chiral centers, it is understood to represent all possible stereoisomers of the compound. The compounds provided herewith may also contain linkages (e.g., carbon-carbon bonds, phosphorus-oxygen bonds, or phosphorus-sulfur bonds) or substituents that can restrict bond rotation, e.g. restriction resulting from the presence of a ring or double bond.

[0101] Without wishing to be bound by theory, the mechanism of action of a bifunctional oligonucleotide may proceed in a number of ways. For example, the bifunctional oligonucleotide may first bind through its alternative splice site targeting sequence to an upstream alternative splice site within a target gene comprising multiple trinucleotide repeats, and then recruit the U1 splicing machinery to initiate splicing. It is hypothesized that in certain cases, as the trinucleotide repeat expansion sequence increases in size (e.g., as in HTT CAG repeats), the repeat expansion becomes inhibitory for the canonical 5′ splice site and may result in an exon 1 fragment due to unproductive splicing. As such, using the bifunctional oligonucleotides to recruit the U1 splicing machinery to a novel site, e.g., upstream to the canonical 5′ splice site, may enhance exonization at this location and, e.g., result in skipping over the inhibitory CAG repeats.

### Methods of Making Bifunctional Oligonucleotides

[0102] The bifunctional oligonucleotides described herein can be prepared using solution-phase or solid-phase organic synthesis. Organic synthesis offers the advantage that the oligonucleotide strands comprising non-natural or modified nucleotides can be easily prepared. Any other means for such synthesis known in the art may additionally or alternatively be employed. It is also known to use similar techniques to prepare other bifunctional oligonucleotides, such as the phosphorothioates, phosphorodithioates and alkylated derivatives. Regardless of the method of synthesis, the bifunctional oligonucleotide can be prepared in a solution (e.g., an aqueous and/or organic solution) that is appropriate for formulation. For example, the bifunctional oligonucleotide preparation can be precipitated and redissolved in pure double-distilled water, and lyophilized. The dried bifunctional oligonucleotide can then be resuspended in a solution appropriate for the intended formulation process. Teachings regarding the synthesis of particular modified oligonucleotides may be found in the following U.S. patents or pending patent applications: U.S. Pat. Nos. 5,138,045 and 5,218,105, drawn to polyamine conjugated oligonucleotides; U.S. Pat. No. 5,212,295, drawn to monomers for the preparation of oligonucleotides having chiral phosphorus linkages; U.S. Pat. Nos. 5,378,825 and 5,541,307, drawn to oligonucleotides having modified backbones; U.S. Pat. No. 5,386,023, drawn to backbone-modified oligonucleotides and the preparation thereof through reductive coupling; U.S. Pat. No. 5,457,191, drawn to modified nucleobases based on the 3-deazapurine ring system and methods of synthesis thereof; each of which is incorporated herein by reference in its entirety.

[0103] In an embodiment, bifunctional oligonucleotides described herein are prepared by connecting nucleosides with optionally protected phosphorus containing internucleoside linkages. Representative protecting groups for phosphorus containing internucleoside linkages such as phosphodiester and phosphorothioate linkages include β-cyanoethyl, diphenylsilylethyl, 6-cyanobutenyl, cyano p-xylyl (CPX), N-methyl-N-trifluoroacetyl ethyl (META), acetoxy phenoxy ethyl (APE) and butene-4-yl groups. See for example U.S. Pat. Nos. 4,725,677 and Re. 34,069 (O-cyanoethyl); Beaucage, S. L. and Iyer, R. P., Tetrahedron, 49 No. 10, pp. 1925-1963 (1993); Beaucage, S. L. and Iyer, R. P., Tetrahedron, 49 No. 46, pp. 10441-10488 (1993); Beaucage, S. L. and Iyer, R. P., Tetrahedron, 48 No. 12, pp. 2223-2311 (1992).

[0104] In an embodiment, nucleosides having reactive phosphorus groups are provided that are useful for forming internucleoside linkages including for example phosphodiester and phosphorothioate internucleoside linkages. Such reactive phosphorus groups are known in the art and contain phosphorus atoms in P^{III} or P^{V} valence state including, but not limited to, phosphoramidite, H-phosphonate, phosphate triesters and phosphorus containing chiral auxiliaries. A preferred synthetic solid phase synthesis utilizes phosphoramidites (P^{III} chemistry) as reactive phosphites. The intermediate phosphite compounds are subsequently oxidized to the Pv state using known methods to yield, in preferred embodiments, phosphodiester or phosphorothioate internucleotide linkages.

### Methods of Delivery

[0105] A bifunctional oligonucleotide described herein may comprise, may be formulated with, or may be delivered in, a carrier. For example, the bifunctional oligonucleotide may be disposed in a vesicle or other membrane-based carrier, such as a liposome or lipid nanoparticle.

[0106] In one embodiment, the bifunctional oligonucleotides described herein can be formulated in liposomes or other similar vesicles. Liposomes are spherical vesicle structures composed of a uni- or multilamellar lipid bilayer surrounding internal aqueous compartments and a relatively impermeable outer lipophilic phospholipid bilayer. Liposomes may be anionic, neutral or cationic. Liposomes are biocompatible, nontoxic, can deliver both hydrophilic and lipophilic drug molecules, protect their cargo from degradation by plasma enzymes, and transport their load across biological membranes and the blood brain barrier (BBB) (see, e.g., Spuch and Navarro, Journal of Drug Delivery, vol. 2011, Article ID 469679, 12 pages, 2011. doi:10.1155/2011/469679 for review).

[0107] Vesicles can be made from several different types of lipids; however, phospholipids are most commonly used to generate liposomes as drug carriers. Methods for preparation of multilamellar vesicle lipids are known in the art (see for example U.S. Pat. No. 6,693,086, the teachings of which relating to multilamellar vesicle lipid preparation are incorporated herein by reference). Although vesicle formation can be spontaneous when a lipid film is mixed with an aqueous solution, it can also be expedited by applying force in the form of shaking by using a homogenizer, sonicator, or an extrusion apparatus (see, e.g., Spuch and Navarro, Journal of Drug Delivery, vol. 2011, Article ID 469679, 12 pages, 2011. doi:10.1155/2011/469679 for review).

[0108] Extruded lipids can be prepared by extruding through filters of decreasing size, as described in Templeton et al., Nature Biotech, 15:647-652, 1997, the teachings of which relating to extruded lipid preparation are incorporated herein by reference.

[0109] Lipid nanoparticles are another example of a carrier that provides a biocompatible and biodegradable delivery system for the bifunctional oligonucleotides described herein. Nanostructured lipid carriers (NLCs) are modified solid lipid nanoparticles (SLNs) that retain the characteristics of the SLN, improve drug stability and loading capacity, and prevent drug leakage. Polymer nanoparticles (PNPs) are an important component of drug delivery. These nanoparticles can effectively direct drug delivery to specific targets and improve drug stability and controlled drug release. Lipid-polymer nanoparticles (PLNs), a new type of carrier that combines liposomes and polymers, may also be employed. These nanoparticles possess the complementary advantages of PNPs and liposomes. A PLN is composed of a core-shell structure; the polymer core provides a stable structure, and the phospholipid shell offers good biocompatibility. As such, the two components increase the drug encapsulation efficiency rate, facilitate surface modification, and prevent leakage of water-soluble drugs. For a review, see, e.g., Li et al. 2017, Nanomaterials 7, 122; doi:10.3390/nano7060122.

[0110] Exemplary lipid nanoparticles are disclosed in International Application PCT/US2014/053907, the entire contents of which are hereby incorporated by reference. For example, an LNP described in paragraphs [403-406] or [410-413] of PCT/US2014/053907 can be used as a carrier for the bifunctional oligonucleotide described herein.

[0111] Additional exemplary lipid nanoparticles are disclosed in U.S. Pat. No. 10,562,849 the entire contents of which are hereby incorporated by reference. For example, an LNP of formula (I) as described in columns 1-3 of U.S. Pat. No. 10,562,849 can be used as a carrier for the bifunctional oligonucleotides described herein.

[0112] Lipids that can be used in nanoparticle formations (e.g., lipid nanoparticles) include, for example those described in Table 4 of WO2019217941, which is incorporated by reference, e.g., a lipid-containing nanoparticle can comprise one or more of the lipids in Table 4 of WO2019217941. Lipid nanoparticles can include additional elements, such as polymers, such as the polymers described in Table 5 of WO2019217941, incorporated by reference.

[0113] In some embodiments, conjugated lipids, when present, can include one or more of PEG-diacylglycerol (DAG) (such as 1-(monomethoxy-polyethyleneglycol)-2,3-dimyristoylglycerol (PEG-DMG)), PEG-dialkyloxypropyl (DAA), PEG-phospholipid, PEG-ceramide (Cer), a pegylated phosphatidylethanoloamine (PEG-PE), PEG succinate diacylglycerol (PEGS-DAG) (such as 4-O-(2′,3′-di(tetradecanoyloxy)propyl-1-O-(w-methoxy(polyethoxy)ethyl) butanedioate (PEG-S-DMG)), PEG dialkoxypropylcarbam, N-(carbonyl-methoxypoly ethylene glycol 2000)-1,2-distearoyl-sn-glycero-3-phosphoethanolamine sodium salt, and those described in Table 2 of WO2019051289 (incorporated by reference), and combinations of the foregoing.

[0114] In some embodiments, sterols that can be incorporated into lipid nanoparticles include one or more of cholesterol or cholesterol derivatives, such as those in WO2009/127060 or US2010/0130588, which are incorporated by reference. Additional exemplary sterols include phytosterols, including those described in Eygeris et al (2020), incorporated herein by reference.

[0115] In some embodiments, the lipid particle comprises an ionizable lipid, a non-cationic lipid, a conjugated lipid that inhibits aggregation of particles, and a sterol. The amounts of these components can be varied independently and to achieve desired properties. For example, in some embodiments, the lipid nanoparticle comprises an ionizable lipid is in an amount from about 20 mol % to about 90 mol % of the total lipids (in other embodiments it may be 20-70% (mol), 30-60% (mol) or 40-50% (mol); about 50 mol % to about 90 mol % of the total lipid present in the lipid nanoparticle), a non-cationic lipid in an amount from about 5 mol % to about 30 mol % of the total lipids, a conjugated lipid in an amount from about 0.5 mol % to about 20 mol % of the total lipids, and a sterol in an amount from about 20 mol % to about 50 mol % of the total lipids. The ratio of total lipid to nucleic acid can be varied as desired. For example, the total lipid to nucleic acid (mass or weight) ratio can be from about 10:1 to about 30:1.

[0116] In some embodiments, the lipid to nucleic acid ratio (mass/mass ratio; w/w ratio) can be in the range of from about 1:1 to about 25:1, from about 10:1 to about 14:1, from about 3:1 to about 15:1, from about 4:1 to about 10:1, from about 5:1 to about 9:1, or about 6:1 to about 9:1. The amounts of lipids and nucleic acid can be adjusted to provide a desired N/P ratio, for example, N/P ratio of 3, 4, 5, 6, 7, 8, 9, 10 or higher. Generally, the lipid nanoparticle formulation's overall lipid content can range from about 5 mg/ml to about 30 mg/mL In some embodiments, a composition described herein (e.g., bifunctional oligonucleotide composition) is provided in an LNP that comprises an ionizable lipid. In some embodiments, the ionizable lipid is heptadecan-9-yl 8-((2-hydroxyethyl)(6-oxo-6-(undecyloxy)hexyl)-amino)octanoate (SM-102); e.g., as described in Example 1 of U.S. Pat. No. 9,867,888 (incorporated by reference herein in its entirety). In some embodiments, the ionizable lipid is 9Z,12Z)-3-((4,4-bis(octyloxy)butanoyl)oxy)-2-((((3-(diethylamino)propoxy)carbonyl)oxy)methyl)propyl octadeca-9,12-dienoate (LPO1), e.g., as synthesized in Example 13 of WO2015/095340 (incorporated by reference herein in its entirety). In some embodiments, the ionizable lipid is Di((Z)-non-2-en-1-yl) 9-((4-dimethylamino)-butanoyl)oxy)heptadecanedioate (L319), e.g. as synthesized in Example 7, 8, or 9 of US2012/0027803 (incorporated by reference herein in its entirety). In some embodiments, the ionizable lipid is 1,1′-((2-(4-(2-((2-(Bis(2-hydroxydodecyl)amino)ethyl)(2-hydroxydodecyl) amino)ethyl)piperazin-1-yl)ethyl)azanediyl)bis(dodecan-2-ol) (C12-200), e.g., as synthesized in Examples 14 and 16 of WO2010/053572 (incorporated by reference herein in its entirety). In some embodiments, the ionizable lipid is Imidazole cholesterol ester (ICE) lipid (3S, 10R, 13R, 17R)-10, 13-dimethyl-17-((R)-6-methylheptan-2-yl)-2, 3, 4, 7, 8, 9, 10, 11, 12, 13, 14, 15, 16, 17-tetradecahydro-1H-cyclopenta[a]phenanthren-3-yl 3-(1H-imidazol-4-yl)propanoate, e.g., Structure (I) from WO2020/106946 (incorporated by reference herein in its entirety).

[0117] In some embodiments, an ionizable lipid may be a cationic lipid, an ionizable cationic lipid, e.g., a cationic lipid that can exist in a positively charged or neutral form depending on pH, or an amine-containing lipid that can be readily protonated. In some embodiments, the cationic lipid is a lipid capable of being positively charged, e.g., under physiological conditions. Exemplary cationic lipids include one or more amine group(s) which bear the positive charge. In some embodiments, the lipid particle comprises a cationic lipid in formulation with one or more of neutral lipids, ionizable amine-containing lipids, biodegradable alkyne lipids, steroids, phospholipids including polyunsaturated lipids, structural lipids (e.g., sterols), PEG, cholesterol and polymer conjugated lipids. In some embodiments, the cationic lipid may be an ionizable cationic lipid. An exemplary cationic lipid as disclosed herein may have an effective pKa over 6.0. In embodiments, a lipid nanoparticle may comprise a second cationic lipid having a different effective pKa (e.g., greater than the first effective pKa), than the first cationic lipid. A lipid nanoparticle may comprise between 40 and 60 mol percent of a cationic lipid, a neutral lipid, a steroid, a polymer conjugated lipid, and a bifunctional oligonucleotide described herein, encapsulated within or associated with the lipid nanoparticle. In some embodiments, the bifunctional oligonucleotide is co-formulated with the cationic lipid. The bifunctional oligonucleotide may be adsorbed to the surface of an LNP, e.g., an LNP comprising a cationic lipid. In some embodiments, the bifunctional oligonucleotide may be encapsulated in an LNP, e.g., an LNP comprising a cationic lipid. In some embodiments, the lipid nanoparticle may comprise a targeting moiety, e.g., coated with a targeting agent. In embodiments, the LNP formulation is biodegradable. In some embodiments, a lipid nanoparticle comprising one or more lipid described herein, e.g., encapsulates at least 1%, at least 5%, at least 10%, at least 20%, at least 30%, at least 40%, at least 50%, at least 60%, at least 70%, at least 80%, at least 90%, at least 92%, at least 95%, at least 97%, at least 98% or 100% of a bifunctional oligonucleotide.

[0118] Exemplary ionizable lipids that can be used in lipid nanoparticle formulations include, without limitation, those listed in Table 1 of WO2019051289, incorporated herein by reference. Additional exemplary lipids include, without limitation, one or more of the following formulae: X of US2016/0311759; I of US20150376115 or in US2016/0376224; I, II or III of US20160151284; I, IA, II, or IIA of US20170210967; I-c of US20150140070; A of US2013/0178541; I of US2013/0303587 or US2013/0123338; I of US2015/0141678; II, III, IV, or V of US2015/0239926; I of US2017/0119904; I or II of WO2017/117528; A of US2012/0149894; A of US2015/0057373; A of WO2013/116126; A of US2013/0090372; A of US2013/0274523; A of US2013/0274504; A of US2013/0053572; A of WO2013/016058; A of WO2012/162210; I of US2008/042973; I, II, III, or IV of US2012/01287670; I or II of US2014/0200257; I, II, or III of US2015/0203446; I or III of US2015/0005363; I, IA, IB, IC, ID, II, IIA, IIB, IIC, IID, or III-XXIV of US2014/0308304; of US2013/0338210; I, 11, III, or IV of WO2009/132131; A of US2012/01011478; I or XXXV of US2012/0027796; XIV or XVII of US2012/0058144; of US2013/0323269; I of US2011/0117125; 1, II, or III of US2011/0256175; I, II, III, IV, V, VI, VII, VIII, IX, X, XI, XII of US2012/0202871; I, II, III, IV, V, VI, VII, VIII, X, XII, XIII, XIV, XV, or XVI of US2011/0076335; I or II of US2006/008378; I of US2013/0123338; I or X-A-Y-Z of US2015/0064242; XVI, XVII, or XVIII of US2013/0022649; I, II, or III of US2013/0116307; I, II, or III of US2013/0116307; I or II of US2010/0062967; I-X of US2013/0189351; I of US2014/0039032; V of US2018/0028664; I of US2016/0317458; I of US2013/0195920; 5, 6, or 10 of U.S. Pat. No. 10,221,127; III-3 of WO2018/081480; 1-5 or I-8 of WO2020/081938; 18 or 25 of U.S. Pat. No. 9,867,888; A of US2019/0136231; II of WO2020/219876; 1 of US2012/0027803; OF-02 of US2019/0240349; 23 of U.S. Pat. No. 10,086,013; cKK-E12/A6 of Miao et al (2020); C12-200 of WO2010/053572; 7C1 of Dahlman et al (2017); 304-013 or 503-013 of Whitehead et al; TS-P4C2 of U.S. Pat. No. 9,708,628; I of WO2020/106946; I of WO2020/106946.

[0119] In some embodiments, the ionizable lipid is MC3 (6Z,9Z,28Z,3 1Z)-heptatriaconta-6,9,28,3 1-tetraen-19-yl-4-(dimethylamino) butanoate (DLin-MC3-DMA or MC3), e.g., as described in Example 9 of WO2019051289A9 (incorporated by reference herein in its entirety). In some embodiments, the ionizable lipid is the lipid ATX-002, e.g., as described in Example 10 of WO2019051289A9 (incorporated by reference herein in its entirety). In some embodiments, the ionizable lipid is (13Z,16Z)-A,A-dimethyl-3-nonyldocosa-13, 16-dien-1-amine (Compound 32), e.g., as described in Example 11 of WO2019051289A9 (incorporated by reference herein in its entirety). In some embodiments, the ionizable lipid is Compound 6 or Compound 22, e.g., as described in Example 12 of WO2019051289A9 (incorporated by reference herein in its entirety).

[0120] Exemplary non-cationic lipids include, but are not limited to, distearoyl-sn-glycero-phosphoethanolamine, distearoylphosphatidylcholine (DSPC), dioleoylphosphatidylcholine (DOPC), dipalmitoylphosphatidylcholine (DPPC), dioleoylphosphatidylglycerol (DOPG), dipalmitoylphosphatidylglycerol (DPPG), dioleoyl-phosphatidylethanolamine (DOPE), palmitoyloleoylphosphatidylcholine (POPC), palmitoyloleoylphosphatidylethanolamine (POPE), dioleoyl-phosphatidylethanolamine 4-(N-maleimidomethyl)-cyclohexane-1-carboxylate (DOPE-mal), dipalmitoyl phosphatidyl ethanolamine (DPPE), dimyristoylphosphoethanolamine (DMPE), distearoyl-phosphatidyl-ethanolamine (DSPE), monomethyl-phosphatidylethanolamine (such as 16-O-monomethyl PE), dimethyl-phosphatidylethanolamine (such as 16-O-dimethyl PE), 18-1-trans PE, l-stearoyl-2-oleoyl-phosphatidyethanolamine (SOPE), hydrogenated soy phosphatidylcholine (HSPC), egg phosphatidylcholine (EPC), dioleoylphosphatidylserine (DOPS), sphingomyelin (SM), dimyristoyl phosphatidylcholine (DMPC), dimyristoyl phosphatidylglycerol (DMPG), distearoylphosphatidylglycerol (DSPG), dierucoylphosphatidylcholine (DEPC), palmitoyloleyolphosphatidylglycerol (POPG), dielaidoyl-phosphatidylethanolamine (DEPE), lecithin, phosphatidylethanolamine, lysolecithin, lysophosphatidylethanolamine, phosphatidylserine, phosphatidylinositol, sphingomyelin, egg sphingomyelin (ESM), cephalin, cardiolipin, phosphatidicacid,cerebrosides, dicetylphosphate, lysophosphatidylcholine, dilinoleoylphosphatidylcholine, or mixtures thereof. It is understood that other diacylphosphatidylcholine and diacylphosphatidylethanolamine phospholipids can also be used. The acyl groups in these lipids are preferably acyl groups derived from fatty acids having C10-C24 carbon chains, e.g., lauroyl, myristoyl, paimitoyl, stearoyl, or oleoyl. Additional exemplary lipids, in certain embodiments, include, without limitation, those described in Kim et al. (2020) dx.doi.org/10.1021/acs.nanolett.Oc01386, incorporated herein by reference. Such lipids include, in some embodiments, plant lipids found to improve liver transfection with mRNA (e.g., DGTS).

[0121] Other examples of non-cationic lipids suitable for use in the lipid nanoparticles include, without limitation, nonphosphorous lipids such as, e.g., stearylamine, dodeeylamine, hexadecylamine, acetyl palmitate, glycerol ricinoleate, hexadecyl stereate, isopropyl myristate, amphoteric acrylic polymers, triethanolamine-lauryl sulfate, alkyl-aryl sulfate polyethyloxylated fatty acid amides, dioctadecyl dimethyl ammonium bromide, ceramide, sphingomyelin, and the like. Other non-cationic lipids are described in WO2017/099823 or US patent publication US2018/0028664, the contents of which is incorporated herein by reference in their entirety.

[0122] In some embodiments, the lipid nanoparticles do not comprise any phospholipids.

[0123] In some aspects, the lipid nanoparticle can further comprise a component, such as a sterol, to provide membrane integrity. One exemplary sterol that can be used in the lipid nanoparticle is cholesterol and derivatives thereof. Non-limiting examples of cholesterol derivatives include polar analogues such as 5a-choiestanol, 53-coprostanol, choiesteryl-(2′-hydroxy)-ethyl ether, choiesteryl-(4′-hydroxy)-butyl ether, and 6-ketocholestanol; non-polar analogues such as 5a-cholestane, cholestenone, 5a-cholestanone, 5p-cholestanone, and cholesteryl decanoate; and mixtures thereof. In some embodiments, the cholesterol derivative is a polar analogue, e.g., choiesteryl-(4′-hydroxy)-butyl ether. Exemplary cholesterol derivatives are described in PCT publication WO2009/127060 and US patent publication US2010/0130588, each of which is incorporated herein by reference in its entirety.

[0124] In some embodiments, the component providing membrane integrity, such as a sterol, can comprise 0-50% (mol) (e.g., 0-10%, 10-20%, 20-30%, 30-40%, or 40-50%) of the total lipid present in the lipid nanoparticle. In some embodiments, such a component is 20-50% (mol) 30-40% (mol) of the total lipid content of the lipid nanoparticle.

[0125] In some embodiments, the lipid nanoparticle can comprise a polyethylene glycol (PEG) or a conjugated lipid molecule. Generally, these are used to inhibit aggregation of lipid nanoparticles and/or provide steric stabilization. Exemplary conjugated lipids include, but are not limited to, PEG-lipid conjugates, polyoxazoline (POZ)-lipid conjugates, polyamide-lipid conjugates (such as ATTA-lipid conjugates), cationic-polymer lipid (CPL) conjugates, and mixtures thereof. In some embodiments, the conjugated lipid molecule is a PEG-lipid conjugate, for example, a (methoxy polyethylene glycol)-conjugated lipid.

[0126] Exemplary PEG-lipid conjugates include, but are not limited to, PEG-diacylglycerol (DAG) (such as 1-(monomethoxy-polyethyleneglycol)-2,3-dimyristoylglycerol (PEG-DMG)), PEG-dialkyloxypropyl (DAA), PEG-phospholipid, PEG-ceramide (Cer), a pegylated phosphatidylethanoloamine (PEG-PE), PEG succinate diacylglycerol (PEGS-DAG) (such as 4-0-(2′,3′-di(tetradecanoyloxy)propyl-l-0-(w-methoxy(polyethoxy)ethyl) butanedioate (PEG-S-DMG)), PEG dialkoxypropylcarbam, N-(carbonyl-methoxypolyethylene glycol 2000)-1,2-distearoyl-sn-glycero-3-phosphoethanolamine sodium salt, or a mixture thereof. Additional exemplary PEG-lipid conjugates are described, for example, in U.S. Pat. Nos. 5,885,613, 6,287,591, US2003/0077829, US2003/0077829, US2005/0175682, US2008/0020058, US2011/0117125, US2010/0130588, US2016/0376224, US2017/0119904, and US/099823, the contents of all of which are incorporated herein by reference in their entirety. In some embodiments, a PEG-lipid is a compound of Formula III, III-a-I, III-a-2, III-b-1, III-b-2, or V of US2018/0028664, the content of which is incorporated herein by reference in its entirety. In some embodiments, a PEG-lipid is of Formula II of US20150376115 or US2016/0376224, the content of both of which is incorporated herein by reference in its entirety. In some embodiments, the PEG-DAA conjugate can be, for example, PEG-dilauryloxypropyl, PEG-dimyristyloxypropyl, PEG-dipalmityloxypropyl, or PEG-distearyloxypropyl. The PEG-lipid can be one or more of PEG-DMG, PEG-dilaurylglycerol, PEG-dipalmitoylglycerol, PEG-disterylglycerol, PEG-dilaurylglycamide, PEG-dimyristylglycamide, PEG-dipalmitoylglycamide, PEG-disterylglycamide, PEG-cholesterol (1-[8′-(Cholest-5-en-3[beta]-oxy)carboxamido-3′,6′-dioxaoctanyl]carbamoyl-[omega]-methyl-poly(ethylene glycol), PEG-DMB (3,4-Ditetradecoxylbenzyl-[omega]-methyl-poly(ethylene glycol) ether), and 1,2-dimyristoyl-sn-glycero-3-phosphoethanolamine-N-[methoxy(polyethylene glycol)-2000]. In some embodiments, the PEG-lipid comprises PEG-DMG, 1,2-dimyristoyl-sn-glycero-3-phosphoethanolamine-N-[methoxy(polyethylene glycol)-2000].

[0127] In some embodiments, the PEG or the conjugated lipid can comprise 0-20% (mol) of the total lipid present in the lipid nanoparticle. In some embodiments, PEG or the conjugated lipid content is 0.5-10% or 2-5% (mol) of the total lipid present in the lipid nanoparticle. Molar ratios of the ionizable lipid, non-cationic-lipid, sterol, and PEG/conjugated lipid can be varied as needed. For example, the lipid particle can comprise 30-70% ionizable lipid by mole or by total weight of the composition, 0-60% cholesterol by mole or by total weight of the composition, 0-30% non-cationic-lipid by mole or by total weight of the composition and 1-10% conjugated lipid by mole or by total weight of the composition. Preferably, the composition comprises 30-40% ionizable lipid by mole or by total weight of the composition, 40-50% cholesterol by mole or by total weight of the composition, and 10-20% non-cationic-lipid by mole or by total weight of the composition. In some other embodiments, the composition is 50-75% ionizable lipid by mole or by total weight of the composition, 20-40% cholesterol by mole or by total weight of the composition, and 5 to 10% non-cationic-lipid, by mole or by total weight of the composition and 1-10% conjugated lipid by mole or by total weight of the composition. The composition may contain 60-70% ionizable lipid by mole or by total weight of the composition, 25-35% cholesterol by mole or by total weight of the composition, and 5-10% non-cationic-lipid by mole or by total weight of the composition. The composition may also contain up to 90% ionizable lipid by mole or by total weight of the composition and 2 to 15% non-cationic lipid by mole or by total weight of the composition. The formulation may also be a lipid nanoparticle formulation, for example comprising 8-30% ionizable lipid by mole or by total weight of the composition, 5-30% non-cationic lipid by mole or by total weight of the composition, and 0-20% cholesterol by mole or by total weight of the composition; 4-25% ionizable lipid by mole or by total weight of the composition, 4-25% non-cationic lipid by mole or by total weight of the composition, 2 to 25% cholesterol by mole or by total weight of the composition, 10 to 35% conjugate lipid by mole or by total weight of the composition, and 5% cholesterol by mole or by total weight of the composition; or 2-30% ionizable lipid by mole or by total weight of the composition, 2-30% non-cationic lipid by mole or by total weight of the composition, 1 to 15% cholesterol by mole or by total weight of the composition, 2 to 35% conjugate lipid by mole or by total weight of the composition, and 1-20% cholesterol by mole or by total weight of the composition; or even up to 90% ionizable lipid by mole or by total weight of the composition and 2-10% non-cationic lipids by mole or by total weight of the composition, or even 100% cationic lipid by mole or by total weight of the composition. In some embodiments, the lipid particle formulation comprises ionizable lipid, phospholipid, cholesterol and a PEG-ylated lipid in a molar ratio of 50:10:38.5:1.5. In some other embodiments, the lipid particle formulation comprises ionizable lipid, cholesterol and a PEG-ylated lipid in a molar ratio of 60:38.5:1.5.

[0128] In some embodiments, the lipid particle comprises ionizable lipid, non-cationic lipid (e.g. phospholipid), a sterol (e.g., cholesterol) and a PEG-ylated lipid, where the molar ratio of lipids ranges from 20 to 70 mole percent for the ionizable lipid, with a target of 40-60, the mole percent of non-cationic lipid ranges from 0 to 30, with a target of 0 to 15, the mole percent of sterol ranges from 20 to 70, with a target of 30 to 50, and the mole percent of PEG-ylated lipid ranges from 1 to 6, with a target of 2 to 5.

[0129] In some embodiments, the lipid particle comprises ionizable lipid/non-cationic-lipid/sterol/conjugated lipid at a molar ratio of 50:10:38.5:1.5.

[0130] In an aspect, the disclosure provides a lipid nanoparticle formulation comprising phospholipids, lecithin, phosphatidylcholine and phosphatidylethanolamine.

[0131] In some embodiments, one or more additional compounds can also be included. Those compounds can be administered separately, or the additional compounds can be included in the lipid nanoparticles of the invention. In other words, the lipid nanoparticles can contain other compounds in addition to the nucleic acid or at least a second nucleic acid, different than the first. Without limitations, other additional compounds can be selected from the group consisting of small or large organic or inorganic molecules, monosaccharides, disaccharides, trisaccharides, oligosaccharides, polysaccharides, peptides, proteins, peptide analogs and derivatives thereof, peptidomimetics, nucleic acids, nucleic acid analogs and derivatives, an extract made from biological materials, or any combinations thereof.

[0132] In some embodiments, LNPs are directed to specific tissues by the addition of targeting domains. For example, biological ligands may be displayed on the surface of LNPs to enhance interaction with cells displaying cognate receptors, thus driving association with and cargo delivery to tissues wherein cells express the receptor. In some embodiments, the biological ligand may be a ligand that drives delivery to the liver, e.g., LNPs that display GalNAc result in delivery of nucleic acid cargo to hepatocytes that display asialoglycoprotein receptor (ASGPR). The work of Akinc et al. Mol Ther 18(7):1357-1364 (2010) teaches the conjugation of a trivalent GalNAc ligand to a PEG-lipid (GalNAc-PEG-DSG) to yield LNPs dependent on ASGPR for observable LNP cargo effect (see, e.g., FIG. 6 of Akinc et al. 2010, supra). Other ligand-displaying LNP formulations, e.g., incorporating folate, transferrin, or antibodies, are discussed in WO2017223135, which is incorporated herein by reference in its entirety, in addition to the references used therein, namely Kolhatkar et al., Curr Drug Discov Technol. 2011 8:197-206; Musacchio and Torchilin, Front Biosci. 2011 16:1388-1412; Yu et al., Mol Membr Biol. 2010 27:286-298; Patil et al., Crit Rev Ther Drug Carrier Syst. 2008 25:1-61; Benoit et al., Biomacromolecules. 2011 12:2708-2714; Zhao et al., Expert Opin Drug Deliv. 2008 5:309-319; Akinc et al., Mol Ther. 2010 18:1357-1364; Srinivasan et al., Methods Mol Biol. 2012 820:105-116; Ben-Arie et al., Methods Mol Biol. 2012 757:497-507; Peer 2010 J Control Release. 20:63-68; Peer et al., Proc Natl Acad Sci USA. 2007 104:4095-4100; Kim et al., Methods Mol Biol. 2011 721:339-353; Subramanya et al., Mol Ther. 2010 18:2028-2037; Song et al., Nat Biotechnol. 2005 23:709-717; Peer et al., Science. 2008 319:627-630; and Peer and Lieberman, Gene Ther. 2011 18:1127-1133.

[0133] In some embodiments, LNPs are selected for tissue-specific activity by the addition of a Selective ORgan Targeting (SORT) molecule to a formulation comprising traditional components, such as ionizable cationic lipids, amphipathic phospholipids, cholesterol and poly(ethylene glycol) (PEG) lipids. The teachings of Cheng et al. Nat Nanotechnol 15(4):313-320 (2020) demonstrate that the addition of a supplemental “SORT” component precisely alters the in vivo RNA delivery profile and mediates tissue-specific (e.g., lungs, liver, spleen) gene delivery and editing as a function of the percentage and biophysical property of the SORT molecule.

[0134] In some embodiments, the LNPs comprise biodegradable, ionizable lipids. In some embodiments, the LNPs comprise (9Z,12Z)-3-((4,4-bis(octyloxy)butanoyl)oxy)-2-((((3-(diethylamino)propoxy)carbonyl)oxy)methyl)propyl octadeca-9,12-dienoate, also called 3-((4,4-bis(octyloxy)butanoyl)oxy)-2-((((3-(diethylamino)propoxy)carbonyl)oxy)methyl)propyl (9Z,12Z)-octadeca-9,12-dienoate) or another ionizable lipid. See, e.g, lipids of WO2019/067992, WO/2017/173054, WO2015/095340, and WO2014/136086, as well as references provided therein. In some embodiments, the term cationic and ionizable in the context of LNP lipids is interchangeable, e.g., wherein ionizable lipids are cationic depending on the pH.

[0135] In some embodiments, the average LNP diameter of the LNP formulation may be between 10s of nm and 100s of nm, e.g., measured by dynamic light scattering (DLS). In some embodiments, the average LNP diameter of the LNP formulation may be from about 40 nm to about 150 nm, such as about 40 nm, 45 nm, 50 nm, 55 nm, 60 nm, 65 nm, 70 nm, 75 nm, 80 nm, 85 nm, 90 nm, 95 nm, 100 nm, 105 nm, 110 nm, 115 nm, 120 nm, 125 nm, 130 nm, 135 nm, 140 nm, 145 nm, or 150 nm. In some embodiments, the average LNP diameter of the LNP formulation may be from about 50 nm to about 100 nm, from about 50 nm to about 90 nm, from about 50 nm to about 80 nm, from about 50 nm to about 70 nm, from about 50 nm to about 60 nm, from about 60 nm to about 100 nm, from about 60 nm to about 90 nm, from about 60 nm to about 80 nm, from about 60 nm to about 70 nm, from about 70 nm to about 100 nm, from about 70 nm to about 90 nm, from about 70 nm to about 80 nm, from about 80 nm to about 100 nm, from about 80 nm to about 90 nm, or from about 90 nm to about 100 nm. In some embodiments, the average LNP diameter of the LNP formulation may be from about 70 nm to about 100 nm. In a particular embodiment, the average LNP diameter of the LNP formulation may be about 80 nm. In some embodiments, the average LNP diameter of the LNP formulation may be about 100 nm. In some embodiments, the average LNP diameter of the LNP formulation ranges from about 1 mm to about 500 mm, from about 5 mm to about 200 mm, from about 10 mm to about 100 mm, from about 20 mm to about 80 mm, from about 25 mm to about 60 mm, from about 30 mm to about 55 mm, from about 35 mm to about 50 mm, or from about 38 mm to about 42 mm.

[0136] A LNP may, in some instances, be relatively homogenous. A polydispersity index may be used to indicate the homogeneity of a LNP, e.g., the particle size distribution of the lipid nanoparticles. A small (e.g., less than 0.3) polydispersity index generally indicates a narrow particle size distribution. A LNP may have a polydispersity index from about 0 to about 0.25, such as 0.01, 0.02, 0.03, 0.04, 0.05, 0.06, 0.07, 0.08, 0.09, 0.10, 0.11, 0.12, 0.13, 0.14, 0.15, 0.16, 0.17, 0.18, 0.19, 0.20, 0.21, 0.22, 0.23, 0.24, or 0.25. In some embodiments, the polydispersity index of a LNP may be from about 0.10 to about 0.20.

[0137] The zeta potential of a LNP may be used to indicate the electrokinetic potential of the composition. In some embodiments, the zeta potential may describe the surface charge of an LNP. Lipid nanoparticles with relatively low charges, positive or negative, are generally desirable, as more highly charged species may interact undesirably with cells, tissues, and other elements in the body. In some embodiments, the zeta potential of a LNP may be from about −10 mV to about +20 mV, from about −10 mV to about +15 mV, from about −10 mV to about +10 mV, from about −10 mV to about +5 mV, from about −10 mV to about 0 mV, from about −10 mV to about −5 mV, from about −5 mV to about +20 mV, from about −5 mV to about +15 mV, from about −5 mV to about +10 mV, from about −5 mV to about +5 mV, from about −5 mV to about 0 mV, from about 0 mV to about +20 mV, from about 0 mV to about +15 mV, from about 0 mV to about +10 mV, from about 0 mV to about +5 mV, from about +5 mV to about +20 mV, from about +5 mV to about +15 mV, or from about +5 mV to about +10 mV.

[0138] The efficiency of encapsulation of a bifunctional oligonucleotide describes the amount of bifunctional oligonucleotide that is encapsulated or otherwise associated with a LNP after preparation, relative to the initial amount provided. The encapsulation efficiency is desirably high (e.g., close to 100%). The encapsulation efficiency may be measured, for example, by comparing the amount of bifunctional oligonucleotide in a solution containing the lipid nanoparticle before and after breaking up the lipid nanoparticle with one or more organic solvents or detergents. An anion exchange resin may be used to measure the amount of free protein or nucleic acid (e.g., RNA) in a solution. Fluorescence may be used to measure the amount of free bifunctional oligonucleotide in a solution. For the lipid nanoparticles described herein, the encapsulation efficiency of a bifunctional oligonucleotide may be at least 50%, for example 50%, 55%, 60%, 65%, 70%, 75%, 80%, 85%, 90%, 91%, 92%, 93%, 94%, 95%, 96%, 97%, 98%, 99%, or 100%. In some embodiments, the encapsulation efficiency may be at least 80%. In some embodiments, the encapsulation efficiency may be at least 90%. In some embodiments, the encapsulation efficiency may be at least 95%.

[0139] A LNP may optionally comprise one or more coatings. In some embodiments, a LNP may be formulated in a capsule, film, or table having a coating. A capsule, film, or tablet including a composition described herein may have any useful size, tensile strength, hardness or density.

[0140] Additional exemplary lipids, formulations, methods, and characterization of LNPs are taught by WO2020061457, which is incorporated herein by reference in its entirety.

[0141] In some embodiments, in vitro or ex vivo cell lipofections are performed using Lipofectamine MessengerMax (Thermo Fisher) or TransIT-mRNA Transfection Reagent (Mirus Bio). In certain embodiments, LNPs are formulated using the GenVoy_ILM ionizable lipid mix (Precision NanoSystems). In certain embodiments, LNPs are formulated using 2,2-dilinoleyl-4-dimethylaminoethyl-[1,3]-dioxolane (DLin-KC2-DMA) or dilinoleylmethyl-4-dimethylaminobutyrate (DLin-MC3-DMA or MC3), the formulation and in vivo use of which are taught in Jayaraman et al. Angew Chem Int Ed Engl 51(34):8529-8533 (2012), incorporated herein by reference in its entirety.

[0142] LNP formulations optimized for the delivery of CRISPR-Cas systems, e.g., Cas9-gRNA RNP, gRNA, Cas9 mRNA, are described in WO2019067992 and WO2019067910, both incorporated by reference.

[0143] Additional specific LNP formulations useful for delivery of nucleic acids are described in U.S. Pat. Nos. 8,158,601 and 8,168,775, both incorporated by reference, which include formulations used in patisiran, sold under the name ONPATTRO.

Delivery without a Carrier

[0144] A bifunctional oligonucleotide described herein can be administered to a cell without a carrier, e.g., via naked delivery of the bifunctional oligonucleotide. In some embodiments, naked delivery as used herein refers to delivery without a carrier. In some embodiments, delivery without a carrier, e.g., naked delivery, comprises delivery with a moiety, e.g., a targeting peptide.

[0145] In some embodiments, a bifunctional oligonucleotide described herein is delivered to a cell without a carrier, e.g., via naked delivery. In some embodiments, the delivery without a carrier, e.g., naked delivery, comprises delivery with a moiety, e.g., a targeting peptide.

### Methods of Use

[0146] Described herein are bifunctional compounds useful for modulating splicing at a mutant splice site, e.g., in a gene or transcript comprising a trinucleotide repeat expansion. In some embodiments, a bifunctional oligonucleotide described herein may be used to alter the amount, structure, or composition of a nucleic acid (e.g., a precursor RNA, e.g., a pre-mRNA, or the resulting mRNA) by increasing or decreasing splicing at a splice site. In some embodiments, increasing or decreasing splicing results in modulating the level or structure of a gene product (e.g., an RNA or protein) produced. In some embodiments, a bifunctional oligonucleotide described herein may modulate a component of the splicing machinery, e.g., by modulating the interaction with a component of the splicing machinery with another entity (e.g., nucleic acid, protein, or a combination thereof). The splicing machinery as referred to herein comprises one or more spliceosome components. Spliceosome components may comprise, for example, one or more of major spliceosome members (U1, U2, U4, U5, U6 snRNPs), or minor spliceosome members (U11, U12, U4atac, U6atac snRNPs) and their accessory splicing factors.

[0147] In another aspect, the present disclosure features a method of modifying of a target (e.g., a precursor RNA, e.g., a pre-mRNA) through inclusion of a splice site in the target, wherein the method comprises providing a bifunctional oligonucleotide described herein. In some embodiments, inclusion of a splice site in a target (e.g., a precursor RNA, e.g., a pre-mRNA, or the resulting mRNA) results in addition or deletion of one or more nucleic acids to the target (e.g., a new exon, e.g. a skipped exon). Addition or deletion of one or more nucleic acids to the target may result in an increase in the levels of a gene product (e.g., RNA, e.g., mRNA, or protein).

[0148] In another aspect, the present disclosure features a method of modifying a target (e.g., a precursor RNA, e.g., a pre-mRNA, or the resulting mRNA) through exclusion of a splice site in the target, wherein the method comprises providing a bifunctional oligonucleotide described herein. In some embodiments, exclusion of a splice site in a target (e.g., a precursor RNA, e.g., a pre-mRNA) results in deletion or addition of one or more nucleic acids from the target (e.g., a skipped exon, e.g. a new exon). Deletion or addition of one or more nucleic acids from the target may result in a decrease in the levels of a gene product (e.g., RNA, e.g., mRNA, or protein). In other embodiments, the methods of modifying a target (e.g., a precursor RNA, e.g., a pre-mRNA, or the resulting mRNA) comprise suppression of splicing at a splice site or enhancement of splicing at a splice site (e.g., by more than about 0.5%, e.g., 1%, 5%, 10%, 15%, 20%, 25%, 30%, 35% 40%, 45%, 50% 55%, 60%, 65%, 70%, 75%, 80%, 85%, 90%, 95%, 99%, or more), e.g., as compared to a reference (e.g., the absence of a bifunctional oligonucleotide described herein, or in a healthy or diseased cell or tissue).

[0149] The methods described herein can be used to modulate splicing, e.g., of a nucleic acid comprising a particular sequence (e.g., a target sequence). Exemplary genes encoding a target sequence (e.g., a target sequence comprising DNA or RNA, e.g., pre-mRNA) include, inter alia, AFF3, AR, ARX, ATN1, ATXN1, ATXN2, ATXN3, ATXN7, ATXN8OS, ATXN8b, CBL2, COMP, DMPK, FMR1, FOXL2, GIPC1, GLS, HOXD13, HTT, JPH3, LOC642361, NUTM2b-AS1, PHOX2B, RUNX2, SOX3, TBP, and ZIC2. In an embodiment, the target gene is AFF3. In an embodiment, the target gene is AR. In an embodiment, the target gene is ARX. In an embodiment, the target gene is ATN1. In an embodiment, the target gene is ATXN1. In an embodiment, the target gene is ATXN2. In an embodiment, the target gene is ATXN3. In an embodiment, the target gene is ATXN7. In an embodiment, the target gene is ATXN8OS. In an embodiment, the target gene is ATXN8b. In an embodiment, the target gene is CBL2. In an embodiment, the target gene is COMP. In an embodiment, the target gene is DMPK. In an embodiment, the target gene is FMR1. In an embodiment, the target gene is FOXL2. In an embodiment, the target gene is GIPC1. In an embodiment, the target gene is GLS. In an embodiment, the target gene is HOXD13. In an embodiment, the target gene is HTT. In an embodiment, the target gene is JPH3. In an embodiment, the target gene is LOC642361. In an embodiment, the target gene is NUTM2b-AS1. In an embodiment, the target gene is PHOX2B. In an embodiment, the target gene is RUNX2. In an embodiment, the target gene is SOX3. In an embodiment, the target gene is TBP. In an embodiment, the target gene is ZIC2.

[0150] In another aspect, the present disclosure features methods for modulating the production of a transcription product in a subject having a neurological disease or disorder. In an embodiment, the neurological disease or disorder is a repeat expansion disease (e.g., a trinucleotide repeat expansion disease). Exemplary diseases and disorders include Huntington's disease, Huntington's disease-like 2, holoprosencephaly 5, spinocerebellar ataxia type 1, spinocerebellar ataxia type 2, spinocerebellar ataxia type 3, spinocerebellar ataxia type 7, spinocerebellar ataxia type 8, spinocerebellar ataxia type 17, myotonic dystrophy type 1, oculopharyngodistal myopathy 2, oculopharyngodistal myopathy with leukoencephalopathy, X-linked intellectual disability, dentatorubral-paltidoluysian atrophy, spinal and bulbar atrphy, cleidocranial dysplasia, synpolydactyly 1, glutaminase deficiency, Jacobsen syndrome, fragile X syndrome, fragile X-associated primary ovarian insufficiency, fragile X-associated tremor/ataxia syndrome, X-linked hypopituitarism, and congenital central hypoventilation syndrome.

[0151] In an embodiment, the trinucleotide repeat comprises CXY, where X and Y are each selected from any one of A, T, C, and G. In an embodiment, the trinucleotide repeat comprises CAG, CTG, CGG, CCG, or GCN. In an embodiment, the target gene, trinucleotide repeat, and number of trinucleotide repeats is selected from one in Table 4.

TABLE 4
Exemplary repeat expansion gene mutations

| | | Repeat | | | Number |
|---|---|---|---|---|---|
| Number | Host Gene | Motif | Location | Repeat Location | of Repeats |
| 1 | HTT | CAG | CDS | chr4: 3074886-3074936: + | 16 |
| 2 | ATXN1 | CAG | CDS | chr6: 16327640-16327710: − | 14 |
| 3 | ATXN3 | CAG | CDS | chr14: 92071003-92071053: − | 11 |
| 4 | DMPK | CTG | 3′ UTR | chr19: 45770210-45770260: − | 16 |
| 5 | GIPC1 | CGG | 5′ UTR | chr19: 14496039-14496089: − | 12 |
| 6 | ARX | GCN | CDS | chrX: 25013648-25013698: − | 16 |
| 7 | ATN1 | CAG | CDS | chr12: 6936727-6936777: + | 15 |
| 8 | AR | CAG | CDS | chrX: 67545327-67545377: + | 16 |
| 9 | ATXN7 | CAG | CDS | chr3: 63912679-63912729: + | 10 |
| 10 | TBP | CAG | CDS | chr6: 170561951-170562021: + | 15 |
| 11 | COMP | GAC | CDS | chr19: 18785996-18786066: − | 7 |
| 12 | RUNX2 | GCN | CDS | chr6: 45422757-45422807: + | 16 |
| 13 | HOXD13 | GCN | CDS | chr2: 176093051-176093101: + | 15 |
| 14 | ATXN2 | CAG | CDS | chr12: 111598964-111599014: − | 15 |
| 15 | GLS | CAG | 5′ UTR | chr2: 190880867-190880917: + | 14 |
| 16 | CBL2 | CCG | 5′ UTR | chr11: 119206376-119206426: + | 4 |
| 17 | AFF3 | CGG | 5′ UTR | chr2: 100104468-100104518: − | 9 |
| 18 | FMR1 | CGG | 5′ UTR | chrX: 147912051-147912101: + | 15 |
| 19 | FMR1 | CGG | 5′ UTR | chrX: 147912051-147912101: + | 15 |
| 20 | FMR1 | CGG | 5′ UTR | chrX: 147912051-147912101: + | 15 |
| 21 | LOC642361 and | CGG/CCG | lncRNA | chr10: 79826364-79826414: − | 10 |
| | NUTM2b-AS1 | | | | |
| 22 | ATXN8OS and | CTG/CAG | 3′ UTR | chr13: 70139382-70139430: + | — |
| | ATXN8b | | and CDS | | |
| 23 | JPH3 | CTG | 3′ UTR | chr16: 87697181-87697231: + | 5 |
| 24 | FOXL2 | GCN | CDS | chr3: 138946012-138946062: − | 15 |
| 25 | PHOX2B | GCN | CDS | chr4: 41745972-41746022: − | 16 |
| 26 | ZIC2 | GCN | CDS | chr13: 99985443-99985493: + | 14 |
| 27 | SOX3 | GCN | CDS | chrX: 140504310-140504360: − | 15 |
| 28 | LOC642361 and | CGG/CCG | lncRNA | chr10: 79826362-79826412: + | 10 |
| | NUTM2b-AS1 | | | | |

### Pharmaceutical Compositions, Kits, and Administration

[0152] The present invention provides pharmaceutical compositions comprising a bifunctional oligonucleotide, e.g., a bifunctional oligonucleotide or a pharmaceutically acceptable salt, solvate, hydrate, tautomer, or stereoisomer, as described herein, and optionally a pharmaceutically acceptable excipient. In certain embodiments, the pharmaceutical composition described herein comprises a bifunctional oligonucleotide or a pharmaceutically acceptable salt thereof, and optionally a pharmaceutically acceptable excipient. In certain embodiments, the bifunctional oligonucleotide or a pharmaceutically acceptable salt, solvate, hydrate, tautomer, or stereoisomer thereof, is provided in an effective amount in the pharmaceutical composition. In certain embodiments, the effective amount is a therapeutically effective amount. In certain embodiments, the effective amount is a prophylactically effective amount.

[0153] Pharmaceutical compositions described herein can be prepared by any method known in the art of pharmacology. In general, such preparatory methods include the steps of bringing the bifunctional oligonucleotide (the “active ingredient”) into association with a carrier and/or one or more other accessory ingredients, and then, if necessary and/or desirable, shaping and/or packaging the product into a desired single- or multi-dose unit.

[0154] Pharmaceutical compositions can be prepared, packaged, and/or sold in bulk, as a single unit dose, and/or as a plurality of single unit doses. As used herein, a “unit dose” is a discrete amount of the pharmaceutical composition comprising a predetermined amount of the active ingredient. The amount of the active ingredient is generally equal to the dosage of the active ingredient which would be administered to a subject and/or a convenient fraction of such a dosage such as, for example, one-half or one-third of such a dosage.

[0155] Relative amounts of the active ingredient, the pharmaceutically acceptable excipient, and/or any additional ingredients in a pharmaceutical composition of the invention will vary, depending upon the identity, size, and/or condition of the subject treated and further depending upon the route by which the composition is to be administered. By way of example, the composition may comprise between 0.1% and 100% (w/w) active ingredient.

[0156] The term “pharmaceutically acceptable excipient” refers to a non-toxic carrier, adjuvant, diluent, or vehicle that does not destroy the pharmacological activity of the compound with which it is formulated. Pharmaceutically acceptable excipients useful in the manufacture of the pharmaceutical compositions of the invention are any of those that are well known in the art of pharmaceutical formulation and include inert diluents, dispersing and/or granulating agents, surface active agents and/or emulsifiers, disintegrating agents, binding agents, preservatives, buffering agents, lubricating agents, and/or oils. Pharmaceutically acceptable excipients useful in the manufacture of the pharmaceutical compositions of the invention include, but are not limited to, ion exchangers, alumina, aluminum stearate, lecithin, serum proteins, such as human serum albumin, buffer substances such as phosphates, glycine, sorbic acid, potassium sorbate, partial glyceride mixtures of saturated vegetable fatty acids, water, salts or electrolytes, such as protamine sulfate, disodium hydrogen phosphate, potassium hydrogen phosphate, sodium chloride, zinc salts, colloidal silica, magnesium trisilicate, polyvinyl pyrrolidone, cellulose-based substances, polyethylene glycol, sodium carboxymethylcellulose, polyacrylates, waxes, polyethylene-polyoxypropylene-block polymers, polyethylene glycol and wool fat.

[0157] Compositions of the present invention may be administered orally, parenterally (including subcutaneous, intramuscular, intravenous and intradermal), by inhalation spray, topically, rectally, nasally, buccally, vaginally or via an implanted reservoir. In some embodiments, provided compounds or compositions are administrable intravenously and/or orally.

[0158] The term “parenteral” as used herein includes subcutaneous, intravenous, intramuscular, intraocular, intravitreal, intra-articular, intra-synovial, intrasternal, intrathecal, intrahepatic, intraperitoneal intralesional and intracranial injection or infusion techniques. Preferably, the compositions are administered orally, subcutaneously, intraperitoneally, or intravenously. Sterile injectable forms of the compositions of this invention may be aqueous or oleaginous suspension. These suspensions may be formulated according to techniques known in the art using suitable dispersing or wetting agents and suspending agents. The sterile injectable preparation may also be a sterile injectable solution or suspension in a non-toxic parenterally acceptable diluent or solvent, for example as a solution in 1,3-butanediol. Among the acceptable vehicles and solvents that may be employed are water, Ringer's solution and isotonic sodium chloride solution. In addition, sterile, fixed oils are conventionally employed as a solvent or suspending medium.

[0159] Pharmaceutically acceptable compositions of this invention may be orally administered in any orally acceptable dosage form including, but not limited to, capsules, tablets, aqueous suspensions or solutions. In the case of tablets for oral use, carriers commonly used include lactose and corn starch. Lubricating agents, such as magnesium stearate, are also typically added. For oral administration in a capsule form, useful diluents include lactose and dried cornstarch. When aqueous suspensions are required for oral use, the active ingredient is combined with emulsifying and suspending agents. If desired, certain sweetening, flavoring or coloring agents may also be added. In some embodiments, a provided oral formulation is formulated for immediate release or sustained/delayed release. In some embodiments, the composition is suitable for buccal or sublingual administration, including tablets, lozenges and pastilles. A provided compound can also be in micro-encapsulated form.

[0160] Alternatively, pharmaceutically acceptable compositions of this invention may be administered in the form of suppositories for rectal administration. Pharmaceutically acceptable compositions of this invention may also be administered topically, especially when the target of treatment includes areas or organs readily accessible by topical application, including diseases of the eye, the skin, or the lower intestinal tract. Suitable topical formulations are readily prepared for each of these areas or organs.

[0161] For ophthalmic use, provided pharmaceutically acceptable compositions may be formulated as micronized suspensions or in an ointment such as petrolatum.

[0162] In order to prolong the effect of a drug, it is often desirable to slow the absorption of the drug from subcutaneous or intramuscular injection. This can be accomplished by the use of a liquid suspension of crystalline or amorphous material with poor water solubility. The rate of absorption of the drug then depends upon its rate of dissolution which, in turn, may depend upon crystal size and crystalline form. Alternatively, delayed absorption of a parenterally administered drug form is accomplished by dissolving or suspending the drug in an oil vehicle.

[0163] Although the descriptions of pharmaceutical compositions provided herein are principally directed to pharmaceutical compositions which are suitable for administration to humans, it will be understood by the skilled artisan that such compositions are generally suitable for administration to animals of all sorts. Modification of pharmaceutical compositions suitable for administration to humans in order to render the compositions suitable for administration to various animals is well understood, and the ordinarily skilled veterinary pharmacologist can design and/or perform such modification with ordinary experimentation.

[0164] Compounds provided herein are typically formulated in dosage unit form, e.g., single unit dosage form, for ease of administration and uniformity of dosage. It will be understood, however, that the total daily usage of the compositions of the present invention will be decided by the attending physician within the scope of sound medical judgment. The specific therapeutically effective dose level for any particular subject or organism will depend upon a variety of factors including the disease being treated and the severity of the disorder; the activity of the specific active ingredient employed; the specific composition employed; the age, body weight, general health, sex and diet of the subject; the time of administration, route of administration, and rate of excretion of the specific active ingredient employed; the duration of the treatment; drugs used in combination or coincidental with the specific active ingredient employed; and like factors well known in the medical arts.

[0165] The exact amount of a compound required to achieve an effective amount will vary from subject to subject, depending, for example, on species, age, and general condition of a subject, severity of the side effects or disorder, identity of the particular compound(s), mode of administration, and the like. The desired dosage can be delivered three times a day, two times a day, once a day, every other day, every third day, every week, every two weeks, every three weeks, or every four weeks. In certain embodiments, the desired dosage can be delivered using multiple administrations (e.g., two, three, four, five, six, seven, eight, nine, ten, eleven, twelve, thirteen, fourteen, or more administrations).

[0166] In certain embodiments, an effective amount of a compound for administration one or more times a day to a 70 kg adult human may comprise about 0.0001 mg to about 3000 mg, about 0.0001 mg to about 2000 mg, about 0.0001 mg to about 1000 mg, about 0.001 mg to about 1000 mg, about 0.01 mg to about 1000 mg, about 0.1 mg to about 1000 mg, about 1 mg to about 1000 mg, about 1 mg to about 100 mg, about 10 mg to about 1000 mg, or about 100 mg to about 1000 mg, of a compound per unit dosage form.

[0167] In certain embodiments, the compounds of Formula (I) may be at dosage levels sufficient to deliver from about 0.001 mg/kg to about 100 mg/kg, from about 0.01 mg/kg to about 50 mg/kg, preferably from about 0.1 mg/kg to about 40 mg/kg, preferably from about 0.5 mg/kg to about 30 mg/kg, from about 0.01 mg/kg to about 10 mg/kg, from about 0.1 mg/kg to about 10 mg/kg, and more preferably from about 1 mg/kg to about 25 mg/kg, of subject body weight per day, one or more times a day, to obtain the desired therapeutic effect.

[0168] It will be appreciated that dose ranges as described herein provide guidance for the administration of provided pharmaceutical compositions to an adult. The amount to be administered to, for example, a child or an adolescent can be determined by a medical practitioner or person skilled in the art and can be lower or the same as that administered to an adult.

[0169] It will be also appreciated that a compound or composition, as described herein, can be administered in combination with one or more additional pharmaceutical agents. The compounds or compositions can be administered in combination with additional pharmaceutical agents that improve their bioavailability, reduce and/or modify their metabolism, inhibit their excretion, and/or modify their distribution within the body. It will also be appreciated that the therapy employed may achieve a desired effect for the same disorder, and/or it may achieve different effects.

[0170] The bi or composition can be administered concurrently with, prior to, or subsequent to, one or more additional pharmaceutical agents, which may be useful as, e.g., combination therapies. Pharmaceutical agents include therapeutically active agents. Pharmaceutical agents also include prophylactically active agents. Each additional pharmaceutical agent may be administered at a dose and/or on a time schedule determined for that pharmaceutical agent. The additional pharmaceutical agents may also be administered together with each other and/or with the bifunctional oligonucleotide or composition described herein in a single dose or administered separately in different doses. The particular combination to employ in a regimen will take into account compatibility of the inventive bifunctional oligonucleotide with the additional pharmaceutical agents and/or the desired therapeutic and/or prophylactic effect to be achieved. In general, it is expected that the additional pharmaceutical agents utilized in combination be utilized at levels that do not exceed the levels at which they are utilized individually. In some embodiments, the levels utilized in combination will be lower than those utilized individually.

[0171] Exemplary additional pharmaceutical agents include, but are not limited to, anti-proliferative agents, anti-cancer agents, anti-diabetic agents, anti-inflammatory agents, immunosuppressant agents, and a pain-relieving agent. Pharmaceutical agents include small organic molecules such as drug bifunctional oligonucleotides (e.g., bifunctional oligonucleotides approved by the U.S. Food and Drug Administration as provided in the Code of Federal Regulations (CFR)), peptides, proteins, carbohydrates, monosaccharides, oligosaccharides, polysaccharides, nucleoproteins, mucoproteins, lipoproteins, synthetic polypeptides or proteins, small molecules linked to proteins, glycoproteins, steroids, nucleic acids, DNAs, RNAs, nucleotides, nucleosides, oligonucleotides, antisense oligonucleotides, lipids, hormones, vitamins, and cells.

[0172] Also encompassed by the invention are kits (e.g., pharmaceutical packs). The inventive kits may be useful for preventing and/or treating a proliferative disease or a non-proliferative disease, e.g., as described herein. The kits provided may comprise an inventive pharmaceutical composition or bifunctional oligonucleotide and a container (e.g., a vial, ampule, bottle, syringe, and/or dispenser package, or other suitable container). In some embodiments, provided kits may optionally further include a second container comprising a pharmaceutical excipient for dilution or suspension of an inventive pharmaceutical composition or bifunctional oligonucleotide. In some embodiments, the inventive pharmaceutical composition or bifunctional oligonucleotide provided in the container and the second container are combined to form one-unit dosage form.

[0173] Thus, in one aspect, provided are kits including a first container comprising a bifunctional oligonucleotide described herein, or a pharmaceutically acceptable salt, solvate, hydrate, tautomer, or stereoisomer thereof, or a pharmaceutical composition thereof. In certain embodiments, the kit of the disclosure includes a first container comprising a bifunctional oligonucleotide described herein, or a pharmaceutically acceptable salt thereof, or a pharmaceutical composition thereof. In certain embodiments, the kits are useful in preventing and/or treating a disease, disorder, or condition described herein in a subject (e.g., a proliferative disease or a non-proliferative disease). In certain embodiments, the kits further include instructions for administering the bifunctional oligonucleotide, or a pharmaceutically acceptable salt, solvate, hydrate, tautomer, or stereoisomer thereof, or a pharmaceutical composition thereof, to a subject to prevent and/or treat a proliferative disease or a non-proliferative disease.

### EXAMPLES

[0174] In order that the disclosure described herein may be more fully understood, the following examples are set forth. The examples described in this application are offered to illustrate the bifunctional oligonucleotides, compositions, and methods provided herein and are not to be construed in any way as limiting their scope.

### Example 1: Design and Synthesis of Exemplary Bifunctional Oligonucleotides

[0175] Bifunctional oligonucleotides described herein were designed to contain at least two distinct targeting sequences, namely an alternate splice site targeting sequence and a spliceosome targeting sequence. The bifunctional oligonucleotides were synthesized from commercially available nucleotide building blocks using standard solid phase synthesis techniques. Exemplary sequences and the corresponding molecular weights are summarized in Table 1.

### Example 2: Transfection of Huntington (HTT) Minigenes and Exemplary Bifunctional Oligonucleotides into HEK2932T Cells

[0176] In order to screen exemplary bifunctional oligonucleotides for activity against HTT minigenes, a cell-based assay was developed in HEK2932T cells. Roughly 30,000 HEK293T cells were plated per well in a 96 well plate. Various HTT mingenes, either wild type or mutant, were transfected into the cells using Lipofectamine 3000 as a transfection agent. After 24 hours, the transfected cells were treated with varying concentrations of bifunctional oligos and control oligonucleotides, ranging from 0-100 nM, using Lipofectamine 2000 as a transfection agent. The cells were lysed between 48-72 hours after treatment with the bifunctional oligonucleotides using a lysis buffer (2% Igepal with 0.1 U/uL RNAsin), and the cell lysates were used directly for qPCR assays (described herein in Example 1) using HTT-minigene specific primer probe sets to detect a splicing event.

### Example 3: Transfection of Exemplary Bifunctional Oligonucleotides into Huntington Disease (HD) Patient-Derived Primary Fibroblasts

[0177] Exemplary bifunctional oligonucleotides were also transfected into HD patient-derived fibroblast cells. Primary HD fibroblasts were used in this experiment, with the wild type cells from the GM07492 cell line and the mutant cells from the GM04857 cell line. Roughly 10,000 patient fibroblasts were plated per well in a 96 well plate. After 24 hours, the cells were treated with varying concentrations of bifunctional oligos and control oligonucleotides, ranging from 0-100 nM, using Lipofectamine 2000 as a transfection agent. The cells were lysed between 48-72 hours after treatment with the bifunctional oligonucleotides using a lysis buffer (2% Igepal with 0.1 U/uL RNAsin), and the cell lysates were used directly for qPCR assays using endogenous HTT-specific primer sets. The results are shown in Table 5, where AJ<1.25, “−”, 1 0.25<=AJ<2.5, ‘Y’, AJ>=2.5, “++”, CJ>0.9, “−” 0.75<CJ<=0.9, “+”, CJ<=0.75, “++”.

TABLE 5

| | BFO (25 nM) | | | | BFO (100 nM) | | | |
|---|---|---|---|---|---|---|---|---|
| SEQ | | | | Primary | | | | Primary |
| ID NO. | AJ1 | AJ2 | CJ | hits | AJ1 | AJ2 | CJ | hits |
| 100 | − | + | − | | − | − | − | |
| 101 | − | + | − | | − | + | − | |
| 102 | + | − | − | | + | + | − | |
| 103 | − | − | − | | + | − | − | |
| 104 | − | − | − | | + | − | − | |
| 105 | − | − | − | | − | − | − | |
| 106 | + | + | − | | + | − | − | |
| 107 | + | − | − | | − | − | − | |
| 108 | + | + | − | | − | − | − | |
| 109 | − | + | − | | + | − | − | |
| 110 | ++ | ++ | − | | + | ++ | − | |
| 111 | ++ | − | − | | − | + | ++ | Y |
| 112 | − | − | − | | − | − | − | |
| 113 | − | − | − | | − | − | − | |
| 114 | − | − | − | | − | − | − | |
| 115 | + | + | − | | − | − | − | |
| 116 | − | − | − | | − | − | − | |
| 117 | + | − | − | | − | − | − | |
| 118 | ++ | − | − | | − | − | − | |
| 119 | − | − | − | | − | + | − | |
| 120 | + | + | − | | − | − | − | |
| 121 | + | − | − | | − | + | − | |
| 122 | + | − | ++ | Y | + | − | − | |
| 123 | ++ | − | − | | + | − | − | |
| 124 | + | − | − | | + | + | − | |
| 125 | + | − | − | | ++ | + | − | Y |
| 126 | − | + | − | | ++ | ++ | − | |
| 127 | − | − | − | | ++ | + | − | |
| 128 | + | − | − | | + | − | − | |
| 129 | − | + | − | | ++ | + | − | |
| 130 | + | + | − | | + | + | − | |
| 131 | + | − | − | | − | − | − | |
| 132 | − | − | − | | − | + | − | |
| 133 | − | + | − | | − | − | − | |
| 134 | + | − | − | | − | − | − | |
| 135 | + | − | + | Y | + | − | − | |
| 136 | − | − | − | | + | − | − | |
| 137 | + | − | − | | + | + | − | |
| 138 | − | + | − | | + | + | − | |
| 139 | + | − | − | | + | ++ | − | |
| 140 | − | − | − | | − | + | − | |
| 141 | − | − | − | | + | + | − | |
| 142 | ++ | − | − | | + | − | − | |
| 143 | + | + | − | | + | ++ | − | |
| 144 | − | − | ++ | | − | − | − | |
| 145 | − | − | + | | − | + | − | |
| 146 | + | − | ++ | Y | + | − | ++ | Y |
| 147 | − | − | ++ | | − | − | ++ | |
| 148 | − | − | − | | − | − | − | |
| 149 | + | − | − | | + | + | − | |
| 150 | − | − | − | | − | − | − | |
| 151 | − | − | − | | + | − | − | |
| 152 | − | − | ++ | | + | − | − | |
| 153 | − | − | − | | − | − | − | |
| 154 | + | + | − | | − | − | − | |
| 155 | − | − | + | | − | − | − | |
| 156 | − | − | + | | − | − | − | |
| 157 | − | + | − | | ++ | − | − | |
| 158 | − | − | − | | − | − | − | |
| 159 | ++ | − | − | | − | − | − | |
| 160 | − | − | − | | ++ | − | − | |
| 161 | + | + | − | | − | + | − | |
| 162 | − | − | − | | + | − | − | |
| 163 | − | − | − | | ++ | ++ | − | |
| 164 | + | − | − | | + | + | − | |
| 165 | + | − | − | | − | + | − | |
| 166 | − | + | − | | + | − | − | |
| 167 | − | − | − | | − | + | − | |
| 168 | − | − | − | | − | + | − | |
| 169 | − | − | − | | − | + | − | |
| 170 | − | − | − | | − | − | − | |
| 171 | − | − | − | | − | − | − | |
| 172 | − | − | − | | − | + | − | |
| 173 | − | − | − | | − | ++ | − | |
| 174 | − | − | − | | − | − | − | |
| 175 | − | − | − | | − | + | − | |
| 176 | − | + | − | | − | − | − | |
| 177 | + | − | − | | − | − | − | |
| 178 | + | + | − | | − | − | − | |
| 179 | + | + | − | | − | − | − | |
| 180 | + | − | − | | + | − | − | |
| 181 | − | − | + | | + | − | − | |
| 182 | ++ | − | − | | + | − | − | |
| 183 | + | − | − | | − | − | − | |
| 184 | ++ | − | − | Y | + | − | − | |
| 185 | + | + | − | | + | + | − | |
| 186 | + | − | − | | − | + | − | |
| 187 | − | − | + | | − | − | − | |
| 188 | + | ++ | + | Y | + | − | − | |
| 189 | + | + | − | | + | + | − | |
| 190 | + | ++ | − | | ++ | + | − | |
| 191 | ++ | ++ | − | Y | ++ | + | − | Y |
| 192 | + | + | − | | + | + | − | |
| 193 | + | − | − | | ++ | + | − | |
| 194 | ++ | ++ | − | | ++ | ++ | − | |
| 195 | ++ | ++ | ++ | Y | ++ | ++ | − | |
| 196 | + | − | − | | − | + | + | Y |
| 197 | ++ | − | ++ | Y | − | − | ++ | |
| 198 | ++ | + | − | | + | − | − | |
| 199 | − | + | − | | − | ++ | − | |
| 200 | − | − | − | | − | + | − | |
| 201 | − | + | − | | − | − | − | |
| 202 | − | − | − | | − | − | − | |
| 203 | − | − | − | | − | − | − | |
| 204 | − | + | − | | ++ | + | ++ | Y |
| 205 | − | − | − | | − | − | ++ | |
| 206 | + | − | ++ | Y | + | − | ++ | Y |
| 207 | − | − | − | | − | + | − | |
| 208 | − | − | − | | − | + | ++ | Y |
| 209 | − | − | + | | − | − | + | |
| 210 | − | − | ++ | | − | − | ++ | |
| 211 | + | + | − | | − | − | + | |
| 212 | − | − | + | | − | − | ++ | |
| 213 | − | − | − | | − | ++ | − | |
| 214 | − | − | ++ | | − | − | − | |
| 215 | − | + | − | | − | ++ | − | |
| 216 | − | − | ++ | | − | − | − | |
| 217 | − | − | ++ | | − | − | + | |
| 218 | − | − | ++ | Y | − | − | ++ | Y |
| 219 | + | − | ++ | Y | − | − | ++ | |
| 220 | − | − | ++ | | − | − | + | |
| 221 | + | − | + | Y | − | − | − | |
| 222 | − | − | − | | − | − | ++ | |
| 223 | − | − | − | | − | − | − | |
| 224 | − | − | ++ | | − | − | − | |
| 225 | − | − | − | | − | − | − | |
| 226 | − | − | − | | − | − | ++ | |
| 227 | − | − | ++ | | − | ++ | − | |
| 228 | ++ | − | − | Y | − | − | + | |
| 229 | − | − | − | | − | − | + | |
| 230 | − | − | + | | − | − | − | |
| 231 | − | − | − | | − | − | ++ | |
| 232 | − | − | − | | + | − | − | |
| 233 | − | − | − | | ++ | + | − | Y |
| 234 | + | ++ | − | Y | − | − | ++ | |
| 235 | − | − | − | | − | − | − | |
| 236 | − | − | − | | − | − | − | |
| 237 | − | − | − | | − | − | − | |
| 238 | − | − | − | | − | − | − | |
| 239 | − | − | + | | − | − | ++ | |
| 240 | + | − | − | | − | − | ++ | |
| 241 | − | − | + | | − | − | ++ | |
| 242 | − | − | − | | − | − | − | |
| 243 | − | − | + | | − | − | + | |
| 244 | + | − | − | | ++ | − | − | |
| 245 | − | − | ++ | Y | − | − | ++ | |
| 246 | − | − | − | | + | + | − | |
| 247 | − | − | − | | − | − | − | |
| 248 | − | + | − | | − | − | − | |
| 249 | − | + | − | | − | − | − | |
| 250 | − | − | − | | − | + | − | |
| 251 | ++ | − | − | | + | − | − | |
| 252 | − | − | − | | + | − | ++ | Y |
| 253 | − | − | − | | − | − | − | |
| 254 | − | − | − | | − | + | − | |

### EQUIVALENTS AND SCOPE

[0178] This application refers to various issued patents, published patent applications, journal articles, and other publications, all of which are incorporated herein by reference. If there is a conflict between any of the incorporated references and the instant specification, the specification shall control. In addition, any particular embodiment of the present invention that falls within the prior art may be explicitly excluded from any one or more of the claims. Because such embodiments are deemed to be known to one of ordinary skill in the art, they may be excluded even if the exclusion is not set forth explicitly herein. Any particular embodiment of the invention can be excluded from any claim, for any reason, whether or not related to the existence of prior art.

[0179] Those skilled in the art will recognize or be able to ascertain using no more than routine experimentation many equivalents to the specific embodiments described herein. The scope of the present embodiments described herein is not intended to be limited to the above Description, Figures, or Examples but rather is as set forth in the appended claims. Those of ordinary skill in the art will appreciate that various changes and modifications to this description may be made without departing from the spirit or scope of the present invention, as defined in the following claims.

The application's sequence listing, which the Patent Office published only in electronic form, follows.

SEQUENCE LISTING (489 sequences)

SEQ ID NO: 1 - DNA, 313 bp, Homo sapiens
  misc_feature 1..313: note = Description of sequence: Huntingtin gene exon 1
  source 1..313: mol_type = genomic DNA
cgagtcggcccgaggcctccggggactgccgtgccgggcgggagaccgccatggcgaccctggaaaagctgatgaaggccttcgagtccctcaagtccttccagcagcagcagcagcagcagcagcagcagcagcagcagcagcagcagcagcagcagcaacagccgccaccgccgccgccgccgccgccgcctcctcagcttcctcagccgccgccgcaggcacagccgctgctgcctcagccgcagccgcccccgccgccgcccccgccgccacccggcccggctgtggctgaggagccgctgcaccgacc

SEQ ID NO: 2-3 - skipped (2 entries)

SEQ ID NO: 4 - RNA, 13 nt, synthetic construct
  misc_feature 1..13: note = Description of sequence: bifunctional oligonucleotide sequence
  source 1..13: mol_type = other RNA
gccaggtaagtat

SEQ ID NO: 5-63 - skipped (59 entries)

SEQ ID NO: 64 - RNA, 20 nt, synthetic construct
  misc_feature 1..20: note = Description of sequence: alternative splice site targeting sequence
  source 1..20: mol_type = other RNA
aaaagcagaacctgagcggc

SEQ ID NO: 65 - DNA, 20 bp, synthetic construct
  misc_feature 1..20: note = Description of sequence: alternative splice site targeting sequence
  source 1..20: mol_type = other DNA
  misc_feature 1..14: note = At this position the backbone is ribose
  misc_feature 16..20: note = At this position the backbone is ribose
ttccagggtcgccatggcgg

SEQ ID NO: 66 - DNA, 20 bp, synthetic construct
  misc_feature 1..20: note = Description of sequence: alternative splice site targeting sequence
  source 1..20: mol_type = other DNA
  misc_feature 1..7: note = At this position the backbone is ribose
  misc_feature 9..20: note = At this position the backbone is ribose
tcagcttttccagggtcgcc

SEQ ID NO: 67 - DNA, 20 bp, synthetic construct
  misc_feature 1..20: note = Description of sequence: alternative splice site targeting sequence
  source 1..20: mol_type = other DNA
  misc_feature 1..7: note = At this position the backbone is ribose
  misc_feature 9..20: note = At this position the backbone is ribose
aaggacttgagggactcgaa

SEQ ID NO: 68 - DNA, 20 bp, synthetic construct
  misc_feature 1..20: note = Description of sequence: alternative splice site targeting sequence
  source 1..20: mol_type = other DNA
  misc_feature 1..7: note = At this position the backbone is ribose
  misc_feature 9..20: note = At this position the backbone is ribose
aaggacttgagggactcgaa

SEQ ID NO: 69 - RNA, 21 nt, synthetic construct
  misc_feature 1..21: note = Description of sequence: component of bifunctional nucleotide
  source 1..21: mol_type = other RNA
aaaagcagaaccttgagcggc

SEQ ID NO: 70 - DNA, 48 bp, synthetic construct
  misc_feature 1..48: note = Description of sequence: HostGene: HTT; Repeat Location: chr4:3074886-3074936:+
  source 1..48: mol_type = other DNA
  misc_feature 4..48: note = Postions may be absent
  misc_feature 4..48: note = repeat of subunit: CAG
cagcagcagcagcagcagcagcagcagcagcagcagcagcagcagcag

SEQ ID NO: 71 - DNA, 42 bp, synthetic construct
  misc_feature 1..42: note = Description of sequence: HostGene: ATXN1; Repeat Location: chr6:16327640-16327710:-
  source 1..42: mol_type = other DNA
  misc_feature 4..42: note = Postions may be absent
  misc_feature 4..42: note = repeat of subunit: CAG
cagcagcagcagcagcagcagcagcagcagcagcagcagcag

SEQ ID NO: 72 - DNA, 33 bp, synthetic construct
  misc_feature 1..33: note = Description of sequence: HostGene: ATXN3; Repeat Location: chr14:92071003-92071053:-
  source 1..33: mol_type = other DNA
  misc_feature 4..33: note = Postions may be absent
  misc_feature 4..33: note = repeat of subunit: CAG
cagcagcagcagcagcagcagcagcagcagcag

SEQ ID NO: 73 - DNA, 48 bp, synthetic construct
  misc_feature 1..48: note = Description of sequence: HostGene: DMPK; Repeat Location: chr19:45770210-45770260:-
  source 1..48: mol_type = other DNA
  misc_feature 4..48: note = Postions may be absent
  misc_feature 4..48: note = repeat of subunit: CTG
ctgctgctgctgctgctgctgctgctgctgctgctgctgctgctgctg

SEQ ID NO: 74 - DNA, 36 bp, synthetic construct
  misc_feature 1..36: note = Description of sequence: HostGene: GIPC1; Repeat Location: chr19:14496039-14496089:-
  source 1..36: mol_type = other DNA
  misc_feature 4..36: note = Postions may be absent
  misc_feature 4..36: note = repeat of subunit: CGG
cggcggcggcggcggcggcggcggcggcggcggcgg

SEQ ID NO: 75 - DNA, 48 bp, synthetic construct
  misc_feature 1..48: note = Description of sequence: HostGene: ARX; Repeat Location: chrX:25013648-25013698:-
  source 1..48: mol_type = other DNA
  misc_feature 4..48: note = Postions may be absent
  misc_feature 4..48: note = repeat of subunit: GCN
  variation 3: note = n is any one of a c g and t
  variation 6: note = n is any one of a c g and t
  variation 9: note = n is any one of a c g and t
  variation 12: note = n is any one of a c g and t
  variation 15: note = n is any one of a c g and t
  variation 18: note = n is any one of a c g and t
  variation 21: note = n is any one of a c g and t
  variation 24: note = n is any one of a c g and t
  variation 27: note = n is any one of a c g and t
  variation 30: note = n is any one of a c g and t
  variation 33: note = n is any one of a c g and t
  variation 36: note = n is any one of a c g and t
  variation 39: note = n is any one of a c g and t
  variation 42: note = n is any one of a c g and t
  variation 45: note = n is any one of a c g and t
  variation 48: note = n is any one of a c g and t
gcngcngcngcngcngcngcngcngcngcngcngcngcngcngcngcn

SEQ ID NO: 76 - DNA, 45 bp, synthetic construct
  misc_feature 1..45: note = Description of sequence: HostGene: ATN1; Repeat Location: chr12:6936727-6936777:+
  source 1..45: mol_type = other DNA
  misc_feature 4..45: note = Postions may be absent
  misc_feature 4..45: note = repeat of subunit: CAG
cagcagcagcagcagcagcagcagcagcagcagcagcagcagcag

SEQ ID NO: 77 - DNA, 48 bp, synthetic construct; identical to SEQ ID NO: 70
  misc_feature 1..48: note = Description of sequence: HostGene: AR; Repeat Location: chrX:67545327-67545377:+
  source 1..48: mol_type = other DNA
  misc_feature 4..48: note = Postions may be absent
  misc_feature 4..48: note = repeat of subunit: CAG

SEQ ID NO: 78 - DNA, 30 bp, synthetic construct
  misc_feature 1..30: note = Description of sequence: HostGene: ATXN7; Repeat Location: chr3:63912679-63912729:+
  source 1..30: mol_type = other DNA
  misc_feature 4..30: note = Postions may be absent
  misc_feature 4..30: note = repeat of subunit: CAG
cagcagcagcagcagcagcagcagcagcag

SEQ ID NO: 79 - DNA, 45 bp, synthetic construct; identical to SEQ ID NO: 76
  misc_feature 1..45: note = Description of sequence: HostGene: TBP; Repeat Location: chr6:170561951-170562021:+
  source 1..45: mol_type = other DNA
  misc_feature 4..45: note = Postions may be absent
  misc_feature 4..45: note = repeat of subunit: CAG

SEQ ID NO: 80 - DNA, 21 bp, synthetic construct
  misc_feature 1..21: note = Description of sequence: HostGene: COMP; Repeat Location: chr19:18785996-18786066:-
  source 1..21: mol_type = other DNA
  misc_feature 4..21: note = Postions may be absent
  misc_feature 4..21: note = repeat of subunit: GAC
gacgacgacgacgacgacgac

SEQ ID NO: 81 - DNA, 48 bp, synthetic construct; identical to SEQ ID NO: 75
  misc_feature 1..48: note = Description of sequence: HostGene: RUNX2; Repeat Location: chr6:45422757-45422807:+
  source 1..48: mol_type = other DNA
  misc_feature 4..48: note = Postions may be absent
  misc_feature 4..48: note = repeat of subunit: GCN
  variation 3: note = n is any one of a c g and t
  variation 6: note = n is any one of a c g and t
  variation 9: note = n is any one of a c g and t
  variation 12: note = n is any one of a c g and t
  variation 15: note = n is any one of a c g and t
  variation 18: note = n is any one of a c g and t
  variation 21: note = n is any one of a c g and t
  variation 24: note = n is any one of a c g and t
  variation 27: note = n is any one of a c g and t
  variation 30: note = n is any one of a c g and t
  variation 33: note = n is any one of a c g and t
  variation 36: note = n is any one of a c g and t
  variation 39: note = n is any one of a c g and t
  variation 42: note = n is any one of a c g and t
  variation 45: note = n is any one of a c g and t
  variation 48: note = n is any one of a c g and t

SEQ ID NO: 82 - DNA, 45 bp, synthetic construct
  misc_feature 1..45: note = Description of sequence: HostGene: HOXD13; Repeat Location: chr2:176093051-176093101:+
  source 1..45: mol_type = other DNA
  misc_feature 4..45: note = Postions may be absent
  misc_feature 4..45: note = repeat of subunit: GCN
  variation 3: note = n is any one of a c g and t
  variation 6: note = n is any one of a c g and t
  variation 9: note = n is any one of a c g and t
  variation 12: note = n is any one of a c g and t
  variation 15: note = n is any one of a c g and t
  variation 18: note = n is any one of a c g and t
  variation 21: note = n is any one of a c g and t
  variation 24: note = n is any one of a c g and t
  variation 27: note = n is any one of a c g and t
  variation 30: note = n is any one of a c g and t
  variation 33: note = n is any one of a c g and t
  variation 36: note = n is any one of a c g and t
  variation 39: note = n is any one of a c g and t
  variation 42: note = n is any one of a c g and t
  variation 45: note = n is any one of a c g and t
gcngcngcngcngcngcngcngcngcngcngcngcngcngcngcn

SEQ ID NO: 83 - DNA, 45 bp, synthetic construct; identical to SEQ ID NO: 76
  misc_feature 1..45: note = Description of sequence: HostGene: ATXN2; Repeat Location: chr12:111598964-111599014:-
  source 1..45: mol_type = other DNA
  misc_feature 4..45: note = Postions may be absent
  misc_feature 4..45: note = repeat of subunit: CAG

SEQ ID NO: 84 - DNA, 42 bp, synthetic construct; identical to SEQ ID NO: 71
  misc_feature 1..42: note = Description of sequence: HostGene: GLS; Repeat Location: chr2:190880867-190880917:+
  source 1..42: mol_type = other DNA
  misc_feature 4..42: note = Postions may be absent
  misc_feature 4..42: note = repeat of subunit: CAG

SEQ ID NO: 85 - DNA, 12 bp, synthetic construct
  misc_feature 1..12: note = Description of sequence: HostGene: CBL2; Repeat Location: chr11:119206376-119206426:+
  source 1..12: mol_type = other DNA
  misc_feature 4..12: note = Postions may be absent
  misc_feature 4..12: note = repeat of subunit: CCG
ccgccgccgccg

SEQ ID NO: 86 - DNA, 27 bp, synthetic construct
  misc_feature 1..27: note = Description of sequence: HostGene: AFF3; Repeat Location: chr2:100104468-100104518:-
  source 1..27: mol_type = other DNA
  misc_feature 4..27: note = Postions may be absent
  misc_feature 4..27: note = repeat of subunit: CGG
cggcggcggcggcggcggcggcggcgg

SEQ ID NO: 87 - DNA, 45 bp, synthetic construct
  misc_feature 1..45: note = Description of sequence: HostGene: FMR1; Repeat Location: chrX:147912051-147912101:+
  source 1..45: mol_type = other DNA
  misc_feature 4..45: note = Postions may be absent
  misc_feature 4..45: note = repeat of subunit: CGG
cggcggcggcggcggcggcggcggcggcggcggcggcggcggcgg

SEQ ID NO: 88 - DNA, 45 bp, synthetic construct; identical to SEQ ID NO: 87
  misc_feature 1..45: note = Description of sequence: HostGene: FMR1; Repeat Location: chrX:147912051-147912101:+
  source 1..45: mol_type = other DNA
  misc_feature 4..45: note = Postions may be absent
  misc_feature 4..45: note = repeat of subunit: CGG

SEQ ID NO: 89 - DNA, 45 bp, synthetic construct; identical to SEQ ID NO: 87
  misc_feature 1..45: note = Description of sequence: HostGene: FMR1; Repeat Location: chrX:147912051-147912101:+
  source 1..45: mol_type = other DNA
  misc_feature 4..45: note = Postions may be absent
  misc_feature 4..45: note = repeat of subunit: CGG

SEQ ID NO: 90 - RNA, 30 nt, synthetic construct
  misc_feature 1..30: note = Description of sequence: HostGene: LOC642361 and NUTM2b-AS1; Repeat Location: chr10:79826364-79826414:-
  source 1..30: mol_type = other RNA
  misc_feature 4..30: note = Postions may be absent
  misc_feature 4..30: note = repeat of subunit: CGG
cggcggcggcggcggcggcggcggcggcgg

SEQ ID NO: 91 - RNA, 30 nt, synthetic construct
  misc_feature 1..30: note = Description of sequence: Host Gene: LOC642361 and NUTM2b-AS1; Repeat Location: chr10:79826364-79826414:-
  source 1..30: mol_type = other RNA
  misc_feature 4..30: note = Postions may be absent
  misc_feature 4..30: note = repeat of subunit: CCG
ccgccgccgccgccgccgccgccgccgccg

SEQ ID NO: 92 - DNA, 15 bp, synthetic construct
  misc_feature 1..15: note = Description of sequence: HostGene: JPH3; Repeat Location: chr16:87697181-87697231:+
  source 1..15: mol_type = other DNA
  misc_feature 4..15: note = Postions may be absent
  misc_feature 4..15: note = repeat of subunit: CTG
ctgctgctgctgctg

SEQ ID NO: 93 - DNA, 45 bp, synthetic construct; identical to SEQ ID NO: 82
  misc_feature 1..45: note = Description of sequence: HostGene: FOXL2; Repeat Location: chr3:138946012-138946062:-
  source 1..45: mol_type = other DNA
  misc_feature 4..45: note = Postions may be absent
  misc_feature 4..45: note = repeat of subunit: GCN
  variation 3: note = n is any one of a c g and t
  variation 6: note = n is any one of a c g and t
  variation 9: note = n is any one of a c g and t
  variation 12: note = n is any one of a c g and t
  variation 15: note = n is any one of a c g and t
  variation 18: note = n is any one of a c g and t
  variation 21: note = n is any one of a c g and t
  variation 24: note = n is any one of a c g and t
  variation 27: note = n is any one of a c g and t
  variation 30: note = n is any one of a c g and t
  variation 33: note = n is any one of a c g and t
  variation 36: note = n is any one of a c g and t
  variation 39: note = n is any one of a c g and t
  variation 42: note = n is any one of a c g and t
  variation 45: note = n is any one of a c g and t

SEQ ID NO: 94 - DNA, 48 bp, synthetic construct; identical to SEQ ID NO: 75
  misc_feature 1..48: note = Description of sequence: HostGene: PHOX2B; Repeat Location: chr4:41745972-41746022:-
  source 1..48: mol_type = other DNA
  misc_feature 4..48: note = Postions may be absent
  misc_feature 4..48: note = repeat of subunit: GCN
  variation 3: note = n is any one of a c g and t
  variation 6: note = n is any one of a c g and t
  variation 9: note = n is any one of a c g and t
  variation 12: note = n is any one of a c g and t
  variation 15: note = n is any one of a c g and t
  variation 18: note = n is any one of a c g and t
  variation 21: note = n is any one of a c g and t
  variation 24: note = n is any one of a c g and t
  variation 27: note = n is any one of a c g and t
  variation 30: note = n is any one of a c g and t
  variation 33: note = n is any one of a c g and t
  variation 36: note = n is any one of a c g and t
  variation 39: note = n is any one of a c g and t
  variation 42: note = n is any one of a c g and t
  variation 45: note = n is any one of a c g and t
  variation 48: note = n is any one of a c g and t

SEQ ID NO: 95 - DNA, 42 bp, synthetic construct
  misc_feature 1..42: note = Description of sequence: HostGene: ZIC2; Repeat Location: chr13:99985443-99985493:+
  source 1..42: mol_type = other DNA
  misc_feature 4..42: note = Postions may be absent
  misc_feature 4..42: note = repeat of subunit: GCN
  variation 3: note = n is any one of a c g and t
  variation 6: note = n is any one of a c g and t
  variation 9: note = n is any one of a c g and t
  variation 12: note = n is any one of a c g and t
  variation 15: note = n is any one of a c g and t
  variation 18: note = n is any one of a c g and t
  variation 21: note = n is any one of a c g and t
  variation 24: note = n is any one of a c g and t
  variation 27: note = n is any one of a c g and t
  variation 30: note = n is any one of a c g and t
  variation 33: note = n is any one of a c g and t
  variation 36: note = n is any one of a c g and t
  variation 39: note = n is any one of a c g and t
  variation 42: note = n is any one of a c g and t
gcngcngcngcngcngcngcngcngcngcngcngcngcngcn

SEQ ID NO: 96 - DNA, 45 bp, synthetic construct; identical to SEQ ID NO: 82
  misc_feature 1..45: note = Description of sequence: HostGene: SOX3; Repeat Location: chrX:140504310-140504360:-
  source 1..45: mol_type = other DNA
  misc_feature 4..45: note = Postions may be absent
  misc_feature 4..45: note = repeat of subunit: GCN
  variation 3: note = n is any one of a c g and t
  variation 6: note = n is any one of a c g and t
  variation 9: note = n is any one of a c g and t
  variation 12: note = n is any one of a c g and t
  variation 15: note = n is any one of a c g and t
  variation 18: note = n is any one of a c g and t
  variation 21: note = n is any one of a c g and t
  variation 24: note = n is any one of a c g and t
  variation 27: note = n is any one of a c g and t
  variation 30: note = n is any one of a c g and t
  variation 33: note = n is any one of a c g and t
  variation 36: note = n is any one of a c g and t
  variation 39: note = n is any one of a c g and t
  variation 42: note = n is any one of a c g and t
  variation 45: note = n is any one of a c g and t

SEQ ID NO: 97 - RNA, 30 nt, synthetic construct; identical to SEQ ID NO: 90
  misc_feature 1..30: note = Description of sequence: HostGene: LOC642361 and NUTM2b-AS1; Repeat Location: chr10:79826362-79826412:+
  source 1..30: mol_type = other RNA
  misc_feature 4..30: note = Postions may be absent
  misc_feature 4..30: note = repeat of subunit: CGG

SEQ ID NO: 98 - RNA, 30 nt, synthetic construct; identical to SEQ ID NO: 91
  misc_feature 1..30: note = Description of sequence: Host Gene: LOC642361 and NUTM2b-AS1; Repeat Location: chr10:79826362-79826412:+
  source 1..30: mol_type = other RNA
  misc_feature 4..30: note = Postions may be absent
  misc_feature 4..30: note = repeat of subunit: CCG

SEQ ID NO: 99 - DNA, 180 bp, synthetic construct
  misc_feature 1..180: note = Description of sequence: Sequence within exonic element
  source 1..180: mol_type = other DNA
  misc_feature 4..180: note = Postions may be absent
  misc_feature 4..180: note = repeat of subunit: CAG
cagcagcagcagcagcagcagcagcagcagcagcagcagcagcagcagcagcagcagcagcagcagcagcagcagcagcagcagcagcagcagcagcagcagcagcagcagcagcagcagcagcagcagcagcagcagcagcagcagcagcagcagcagcagcagcagcagcagcagcag

SEQ ID NO: 100 - RNA, 33 nt, synthetic construct
  misc_feature 1..33: note = Description of sequence: bifunctional oligonucleotide
  source 1..33: mol_type = other RNA
  modified_base 1: mod_base = gm
  modified_base 2: mod_base = cm
  modified_base 3: mod_base = cm
  modified_base 4: mod_base = OTHER; note = 2'O-methyl-adenosine
  modified_base 5: mod_base = gm
  modified_base 6: mod_base = gm
  modified_base 7: mod_base = um
  modified_base 8: mod_base = OTHER; note = 2'O-methyl-adenosine
  modified_base 9: mod_base = OTHER; note = 2'O-methyl-adenosine
  modified_base 10: mod_base = gm
  modified_base 11: mod_base = um
  modified_base 12: mod_base = OTHER; note = 2'O-methyl-adenosine
  modified_base 13: mod_base = um
  modified_base 14: mod_base = OTHER; note = 2'O-methyl-adenosine
  modified_base 15: mod_base = um
  modified_base 16: mod_base = OTHER; note = locked nucleic acid
  modified_base 17: mod_base = um
  modified_base 18: mod_base = um
  modified_base 19: mod_base = gm
  modified_base 20: mod_base = OTHER; note = locked nucleic acid
  modified_base 21: mod_base = OTHER; note = 2'O-methyl-adenosine
  modified_base 22: mod_base = cm
  modified_base 23: mod_base = cm
  modified_base 24: mod_base = OTHER; note = locked nucleic acid
  modified_base 25: mod_base = gm
  modified_base 26: mod_base = um
  modified_base 27: mod_base = cm
  modified_base 28: mod_base = OTHER; note = locked nucleic acid
  modified_base 29: mod_base = cm
  modified_base 30: mod_base = gm
  modified_base 31: mod_base = gm
  modified_base 32: mod_base = OTHER; note = locked nucleic acid
  modified_base 33: mod_base = OTHER; note = 2'O-methyl-adenosine
gccaggtaagtatatcttggacccgtcccggca

SEQ ID NO: 101 - DNA, 33 bp, synthetic construct
  misc_feature 1..33: note = Description of sequence: bifunctional oligonucleotide
  source 1..33: mol_type = other DNA
  modified_base 1: mod_base = gm
  modified_base 2: mod_base = cm
  modified_base 3: mod_base = cm
  modified_base 4: mod_base = OTHER; note = 2'O-methyl-adenosine
  modified_base 5: mod_base = gm
  modified_base 6: mod_base = gm
  modified_base 7: mod_base = um
  modified_base 8: mod_base = OTHER; note = 2'O-methyl-adenosine
  modified_base 9: mod_base = OTHER; note = 2'O-methyl-adenosine
  modified_base 10: mod_base = gm
  modified_base 11: mod_base = um
  modified_base 12: mod_base = OTHER; note = 2'O-methyl-adenosine
  modified_base 13: mod_base = um
  modified_base 14: mod_base = cm
  modified_base 15: mod_base = OTHER; note = 2'O-methyl-adenosine
  modified_base 16: mod_base = OTHER; note = locked nucleic acid
  modified_base 17: mod_base = cm
  modified_base 18: mod_base = um
  modified_base 19: mod_base = um
  modified_base 20: mod_base = OTHER; note = locked nucleic acid
  modified_base 21: mod_base = gm
  modified_base 22: mod_base = OTHER; note = 2'O-methyl-adenosine
  modified_base 23: mod_base = cm
  modified_base 24: mod_base = OTHER; note = locked nucleic acid
  modified_base 25: mod_base = cm
  modified_base 26: mod_base = gm
  modified_base 27: mod_base = um
  modified_base 28: mod_base = OTHER; note = locked nucleic acid
  modified_base 29: mod_base = cm
  modified_base 30: mod_base = cm
  modified_base 31: mod_base = gm
  modified_base 32: mod_base = OTHER; note = locked nucleic acid
  modified_base 33: mod_base = cm
  misc_feature 1..15: note = At this position backbone is RNA
  misc_feature 17..33: note = At this position backbone is RNA
gccaggtaagtatcatcttggacccgtcccggc

SEQ ID NO: 102 - DNA, 33 bp, synthetic construct
  misc_feature 1..33: note = Description of sequence: bifunctional oligonucleotide
  source 1..33: mol_type = other DNA
  modified_base 1: mod_base = gm
  modified_base 2: mod_base = cm
  modified_base 3: mod_base = cm
  modified_base 4: mod_base = OTHER; note = 2'O-methyl-adenosine
  modified_base 5: mod_base = gm
  modified_base 6: mod_base = gm
  modified_base 7: mod_base = um
  modified_base 8: mod_base = OTHER; note = 2'O-methyl-adenosine
  modified_base 9: mod_base = OTHER; note = 2'O-methyl-adenosine
  modified_base 10: mod_base = gm
  modified_base 11: mod_base = um
  modified_base 12: mod_base = OTHER; note = 2'O-methyl-adenosine
  modified_base 13: mod_base = um
  modified_base 14: mod_base = cm
  modified_base 15: mod_base = cm
  modified_base 16: mod_base = OTHER; note = locked nucleic acid
  modified_base 17: mod_base = um
  modified_base 18: mod_base = cm
  modified_base 19: mod_base = um
  modified_base 20: mod_base = OTHER; note = locked nucleic acid
  modified_base 21: mod_base = gm
  modified_base 22: mod_base = gm
  modified_base 23: mod_base = OTHER; note = 2'O-methyl-adenosine
  modified_base 24: mod_base = OTHER; note = locked nucleic acid
  modified_base 25: mod_base = cm
  modified_base 26: mod_base = cm
  modified_base 27: mod_base = gm
  modified_base 28: mod_base = OTHER; note = locked nucleic acid
  modified_base 29: mod_base = cm
  modified_base 30: mod_base = cm
  modified_base 31: mod_base = cm
  modified_base 32: mod_base = OTHER; note = locked nucleic acid
  modified_base 33: mod_base = gm
  misc_feature 1..19: note = At this position backbone is RNA
  misc_feature 21..27: note = At this position backbone is RNA
  misc_feature 29..33: note = At this position backbone is RNA
gccaggtaagtatccatcttggacccgtcccgg

SEQ ID NO: 103 - DNA, 33 bp, synthetic construct
  misc_feature 1..33: note = Description of sequence: bifunctional oligonucleotide
  source 1..33: mol_type = other DNA
  modified_base 1: mod_base = gm
  modified_base 2: mod_base = cm
  modified_base 3: mod_base = cm
  modified_base 4: mod_base = OTHER; note = 2'O-methyl-adenosine
  modified_base 5: mod_base = gm
  modified_base 6: mod_base = gm
  modified_base 7: mod_base = um
  modified_base 8: mod_base = OTHER; note = 2'O-methyl-adenosine
  modified_base 9: mod_base = OTHER; note = 2'O-methyl-adenosine
  modified_base 10: mod_base = gm
  modified_base 11: mod_base = um
  modified_base 12: mod_base = OTHER; note = 2'O-methyl-adenosine
  modified_base 13: mod_base = um
  modified_base 14: mod_base = um
  modified_base 15: mod_base = cm
  modified_base 16: mod_base = OTHER; note = locked nucleic acid
  modified_base 17: mod_base = OTHER; note = 2'O-methyl-adenosine
  modified_base 18: mod_base = um
  modified_base 19: mod_base = cm
  modified_base 20: mod_base = OTHER; note = locked nucleic acid
  modified_base 21: mod_base = um
  modified_base 22: mod_base = gm
  modified_base 23: mod_base = gm
  modified_base 24: mod_base = OTHER; note = locked nucleic acid
  modified_base 25: mod_base = cm
  modified_base 26: mod_base = cm
  modified_base 27: mod_base = cm
  modified_base 28: mod_base = OTHER; note = locked nucleic acid
  modified_base 29: mod_base = um
  modified_base 30: mod_base = cm
  modified_base 31: mod_base = cm
  modified_base 32: mod_base = OTHER; note = locked nucleic acid
  modified_base 33: mod_base = gm
  misc_feature 1..19: note = At this position backbone is RNA
  misc_feature 21..33: note = At this position backbone is RNA
gccaggtaagtattccatcttggacccgtcccg

SEQ ID NO: 104 - RNA, 33 nt, synthetic construct
  misc_feature 1..33: note = Description of sequence: bifunctional oligonucleotide
  source 1..33: mol_type = other RNA
  modified_base 1: mod_base = gm
  modified_base 2: mod_base = cm
  modified_base 3: mod_base = cm
  modified_base 4: mod_base = OTHER; note = 2'O-methyl-adenosine
  modified_base 5: mod_base = gm
  modified_base 6: mod_base = gm
  modified_base 7: mod_base = um
  modified_base 8: mod_base = OTHER; note = 2'O-methyl-adenosine
  modified_base 9: mod_base = OTHER; note = 2'O-methyl-adenosine
  modified_base 10: mod_base = gm
  modified_base 11: mod_base = um
  modified_base 12: mod_base = OTHER; note = 2'O-methyl-adenosine
  modified_base 13: mod_base = um
  modified_base 14: mod_base = gm
  modified_base 15: mod_base = um
  modified_base 16: mod_base = OTHER; note = locked nucleic acid
  modified_base 17: mod_base = cm
  modified_base 18: mod_base = OTHER; note = 2'O-methyl-adenosine
  modified_base 19: mod_base = um
  modified_base 20: mod_base = OTHER; note = locked nucleic acid
  modified_base 21: mod_base = um
  modified_base 22: mod_base = um
  modified_base 23: mod_base = gm
  modified_base 24: mod_base = OTHER; note = locked nucleic acid
  modified_base 25: mod_base = OTHER; note = 2'O-methyl-adenosine
  modified_base 26: mod_base = cm
  modified_base 27: mod_base = cm
  modified_base 28: mod_base = OTHER; note = locked nucleic acid
  modified_base 29: mod_base = gm
  modified_base 30: mod_base = um
  modified_base 31: mod_base = cm
  modified_base 32: mod_base = OTHER; note = locked nucleic acid
  modified_base 33: mod_base = cm
gccaggtaagtatgtccatcttggacccgtccc

SEQ ID NO: 105 - DNA, 33 bp, synthetic construct
  misc_feature 1..33: note = Description of sequence: bifunctional oligonucleotide
  source 1..33: mol_type = other DNA
  modified_base 1: mod_base = gm
  modified_base 2: mod_base = cm
  modified_base 3: mod_base = cm
  modified_base 4: mod_base = OTHER; note = 2'O-methyl-adenosine
  modified_base 5: mod_base = gm
  modified_base 6: mod_base = gm
  modified_base 7: mod_base = um
  modified_base 8: mod_base = OTHER; note = 2'O-methyl-adenosine
  modified_base 9: mod_base = OTHER; note = 2'O-methyl-adenosine
  modified_base 10: mod_base = gm
  modified_base 11: mod_base = um
  modified_base 12: mod_base = OTHER; note = 2'O-methyl-adenosine
  modified_base 13: mod_base = um
  modified_base 14: mod_base = cm
  modified_base 15: mod_base = gm
  modified_base 16: mod_base = OTHER; note = locked nucleic acid
  modified_base 17: mod_base = cm
  modified_base 18: mod_base = cm
  modified_base 19: mod_base = OTHER; note = 2'O-methyl-adenosine
  modified_base 20: mod_base = OTHER; note = locked nucleic acid
  modified_base 21: mod_base = cm
  modified_base 22: mod_base = um
  modified_base 23: mod_base = um
  modified_base 24: mod_base = OTHER; note = locked nucleic acid
  modified_base 25: mod_base = gm
  modified_base 26: mod_base = OTHER; note = 2'O-methyl-adenosine
  modified_base 27: mod_base = cm
  modified_base 28: mod_base = OTHER; note = locked nucleic acid
  modified_base 29: mod_base = cm
  modified_base 30: mod_base = gm
  modified_base 31: mod_base = um
  modified_base 32: mod_base = OTHER; note = locked nucleic acid
  modified_base 33: mod_base = cm
  misc_feature 1..15: note = At this position backbone is RNA
  misc_feature 17..19: note = At this position backbone is RNA
  misc_feature 21..33: note = At this position backbone is RNA
gccaggtaagtatcgtccatcttggacccgtcc

SEQ ID NO: 106 - DNA, 33 bp, synthetic construct
  misc_feature 1..33: note = Description of sequence: bifunctional oligonucleotide
  source 1..33: mol_type = other DNA
  modified_base 1: mod_base = gm
  modified_base 2: mod_base = cm
  modified_base 3: mod_base = cm
  modified_base 4: mod_base = OTHER; note = 2'O-methyl-adenosine
  modified_base 5: mod_base = gm
  modified_base 6: mod_base = gm
  modified_base 7: mod_base = um
  modified_base 8: mod_base = OTHER; note = 2'O-methyl-adenosine
  modified_base 9: mod_base = OTHER; note = 2'O-methyl-adenosine
  modified_base 10: mod_base = gm
  modified_base 11: mod_base = um
  modified_base 12: mod_base = OTHER; note = 2'O-methyl-adenosine
  modified_base 13: mod_base = um
  modified_base 14: mod_base = cm
  modified_base 15: mod_base = cm
  modified_base 16: mod_base = OTHER; note = locked nucleic acid
  modified_base 17: mod_base = um
  modified_base 18: mod_base = cm
  modified_base 19: mod_base = cm
  modified_base 20: mod_base = OTHER; note = locked nucleic acid
  modified_base 21: mod_base = um
  modified_base 22: mod_base = cm
  modified_base 23: mod_base = um
  modified_base 24: mod_base = OTHER; note = locked nucleic acid
  modified_base 25: mod_base = gm
  modified_base 26: mod_base = gm
  modified_base 27: mod_base = OTHER; note = 2'O-methyl-adenosine
  modified_base 28: mod_base = OTHER; note = locked nucleic acid
  modified_base 29: mod_base = cm
  modified_base 30: mod_base = cm
  modified_base 31: mod_base = gm
  modified_base 32: mod_base = OTHER; note = locked nucleic acid
  modified_base 33: mod_base = cm
  misc_feature 1..23: note = At this position backbone is RNA
  misc_feature 25..31: note = At this position backbone is RNA
  misc_feature 33: note = At this position backbone is RNA
gccaggtaagtatccgtccatcttggacccgtc

SEQ ID NO: 107 - DNA, 33 bp, synthetic construct
  misc_feature 1..33: note = Description of sequence: bifunctional oligonucleotide
  source 1..33: mol_type = other DNA
  modified_base 1: mod_base = gm
  modified_base 2: mod_base = cm
  modified_base 3: mod_base = cm
  modified_base 4: mod_base = OTHER; note = 2'O-methyl-adenosine
  modified_base 5: mod_base = gm
  modified_base 6: mod_base = gm
  modified_base 7: mod_base = um
  modified_base 8: mod_base = OTHER; note = 2'O-methyl-adenosine
  modified_base 9: mod_base = OTHER; note = 2'O-methyl-adenosine
  modified_base 10: mod_base = gm
  modified_base 11: mod_base = um
  modified_base 12: mod_base = OTHER; note = 2'O-methyl-adenosine
  modified_base 13: mod_base = um
  modified_base 14: mod_base = gm
  modified_base 15: mod_base = cm
  modified_base 16: mod_base = OTHER; note = locked nucleic acid
  modified_base 17: mod_base = gm
  modified_base 18: mod_base = um
  modified_base 19: mod_base = cm
  modified_base 20: mod_base = OTHER; note = locked nucleic acid
  modified_base 21: mod_base = OTHER; note = 2'O-methyl-adenosine
  modified_base 22: mod_base = um
  modified_base 23: mod_base = cm
  modified_base 24: mod_base = OTHER; note = locked nucleic acid
  modified_base 25: mod_base = um
  modified_base 26: mod_base = gm
  modified_base 27: mod_base = gm
  modified_base 28: mod_base = OTHER; note = locked nucleic acid
  modified_base 29: mod_base = cm
  modified_base 30: mod_base = cm
  modified_base 31: mod_base = cm
  modified_base 32: mod_base = OTHER; note = locked nucleic acid
  modified_base 33: mod_base = um
  misc_feature 1..23: note = At this position backbone is RNA
  misc_feature 25..33: note = At this position backbone is RNA
gccaggtaagtatgccgtccatcttggacccgt

SEQ ID NO: 108 - RNA, 33 nt, synthetic construct
  misc_feature 1..33: note = Description of sequence: bifunctional oligonucleotide
  source 1..33: mol_type = other RNA
  modified_base 1: mod_base = gm
  modified_base 2: mod_base = cm
  modified_base 3: mod_base = cm
  modified_base 4: mod_base = OTHER; note = 2'O-methyl-adenosine
  modified_base 5: mod_base = gm
  modified_base 6: mod_base = gm
  modified_base 7: mod_base = um
  modified_base 8: mod_base = OTHER; note = 2'O-methyl-adenosine
  modified_base 9: mod_base = OTHER; note = 2'O-methyl-adenosine
  modified_base 10: mod_base = gm
  modified_base 11: mod_base = um
  modified_base 12: mod_base = OTHER; note = 2'O-methyl-adenosine
  modified_base 13: mod_base = um
  modified_base 14: mod_base = gm
  modified_base 15: mod_base = gm
  modified_base 16: mod_base = OTHER; note = locked nucleic acid
  modified_base 17: mod_base = cm
  modified_base 18: mod_base = gm
  modified_base 19: mod_base = um
  modified_base 20: mod_base = OTHER; note = locked nucleic acid
  modified_base 21: mod_base = cm
  modified_base 22: mod_base = OTHER; note = 2'O-methyl-adenosine
  modified_base 23: mod_base = um
  modified_base 24: mod_base = OTHER; note = locked nucleic acid
  modified_base 25: mod_base = um
  modified_base 26: mod_base = um
  modified_base 27: mod_base = gm
  modified_base 28: mod_base = OTHER; note = locked nucleic acid
  modified_base 29: mod_base = OTHER; note = 2'O-methyl-adenosine
  modified_base 30: mod_base = cm
  modified_base 31: mod_base = cm
  modified_base 32: mod_base = OTHER; note = locked nucleic acid
  modified_base 33: mod_base = gm
gccaggtaagtatggccgtccatcttggacccg

SEQ ID NO: 109 - DNA, 33 bp, synthetic construct
  misc_feature 1..33: note = Description of sequence: bifunctional oligonucleotide
  source 1..33: mol_type = other DNA
  modified_base 1: mod_base = gm
  modified_base 2: mod_base = cm
  modified_base 3: mod_base = cm
  modified_base 4: mod_base = OTHER; note = 2'O-methyl-adenosine
  modified_base 5: mod_base = gm
  modified_base 6: mod_base = gm
  modified_base 7: mod_base = um
  modified_base 8: mod_base = OTHER; note = 2'O-methyl-adenosine
  modified_base 9: mod_base = OTHER; note = 2'O-methyl-adenosine
  modified_base 10: mod_base = gm
  modified_base 11: mod_base = um
  modified_base 12: mod_base = OTHER; note = 2'O-methyl-adenosine
  modified_base 13: mod_base = um
  modified_base 14: mod_base = cm
  modified_base 15: mod_base = gm
  modified_base 16: mod_base = OTHER; note = locked nucleic acid
  modified_base 17: mod_base = cm
  modified_base 18: mod_base = cm
  modified_base 19: mod_base = gm
  modified_base 20: mod_base = OTHER; note = locked nucleic acid
  modified_base 21: mod_base = cm
  modified_base 22: mod_base = cm
  modified_base 23: mod_base = OTHER; note = 2'O-methyl-adenosine
  modified_base 24: mod_base = OTHER; note = locked nucleic acid
  modified_base 25: mod_base = cm
  modified_base 26: mod_base = um
  modified_base 27: mod_base = um
  modified_base 28: mod_base = OTHER; note = locked nucleic acid
  modified_base 29: mod_base = gm
  modified_base 30: mod_base = OTHER; note = 2'O-methyl-adenosine
  modified_base 31: mod_base = cm
  modified_base 32: mod_base = OTHER; note = locked nucleic acid
  modified_base 33: mod_base = cm
  misc_feature 1..19: note = At this position backbone is RNA
  misc_feature 21..23: note = At this position backbone is RNA
  misc_feature 25..33: note = At this position backbone is RNA
gccaggtaagtatcggccgtccatcttggaccc

SEQ ID NO: 110 - DNA, 33 bp, synthetic construct
  misc_feature 1..33: note = Description of sequence: bifunctional oligonucleotide
  source 1..33: mol_type = other DNA
  modified_base 1: mod_base = gm
  modified_base 2: mod_base = cm
  modified_base 3: mod_base = cm
  modified_base 4: mod_base = OTHER; note = 2'O-methyl-adenosine
  modified_base 5: mod_base = gm
  modified_base 6: mod_base = gm
  modified_base 7: mod_base = um
  modified_base 8: mod_base = OTHER; note = 2'O-methyl-adenosine
  modified_base 9: mod_base = OTHER; note = 2'O-methyl-adenosine
  modified_base 10: mod_base = gm
  modified_base 11: mod_base = um
  modified_base 12: mod_base = OTHER; note = 2'O-methyl-adenosine
  modified_base 13: mod_base = um
  modified_base 14: mod_base = gm
  modified_base 15: mod_base = cm
  modified_base 16: mod_base = OTHER; note = locked nucleic acid
  modified_base 17: mod_base = gm
  modified_base 18: mod_base = cm
  modified_base 19: mod_base = cm
  modified_base 20: mod_base = OTHER; note = locked nucleic acid
  modified_base 21: mod_base = um
  modified_base 22: mod_base = cm
  modified_base 23: mod_base = cm
  modified_base 24: mod_base = OTHER; note = locked nucleic acid
  modified_base 25: mod_base = um
  modified_base 26: mod_base = cm
  modified_base 27: mod_base = um
  modified_base 28: mod_base = OTHER; note = locked nucleic acid
  modified_base 29: mod_base = gm
  modified_base 30: mod_base = gm
  modified_base 31: mod_base = OTHER; note = 2'O-methyl-adenosine
  modified_base 32: mod_base = OTHER; note = locked nucleic acid
  modified_base 33: mod_base = cm
  misc_feature 1..27: note = At this position backbone is RNA
  misc_feature 29..33: note = At this position backbone is RNA
gccaggtaagtatgcggccgtccatcttggacc

SEQ ID NO: 111 - DNA, 33 bp, synthetic construct
  misc_feature 1..33: note = Description of sequence: bifunctional oligonucleotide
  source 1..33: mol_type = other DNA
  modified_base 1: mod_base = gm
  modified_base 2: mod_base = cm
  modified_base 3: mod_base = cm
  modified_base 4: mod_base = OTHER; note = 2'O-methyl-adenosine
  modified_base 5: mod_base = gm
  modified_base 6: mod_base = gm
  modified_base 7: mod_base = um
  modified_base 8: mod_base = OTHER; note = 2'O-methyl-adenosine
  modified_base 9: mod_base = OTHER; note = 2'O-methyl-adenosine
  modified_base 10: mod_base = gm
  modified_base 11: mod_base = um
  modified_base 12: mod_base = OTHER; note = 2'O-methyl-adenosine
  modified_base 13: mod_base = um
  modified_base 14: mod_base = OTHER; note = 2'O-methyl-adenosine
  modified_base 15: mod_base = gm
  modified_base 16: mod_base = OTHER; note = locked nucleic acid
  modified_base 17: mod_base = gm
  modified_base 18: mod_base = gm
  modified_base 19: mod_base = cm
  modified_base 20: mod_base = OTHER; note = locked nucleic acid
  modified_base 21: mod_base = gm
  modified_base 22: mod_base = um
  modified_base 23: mod_base = cm
  modified_base 24: mod_base = OTHER; note = locked nucleic acid
  modified_base 25: mod_base = OTHER; note = 2'O-methyl-adenosine
  modified_base 26: mod_base = um
  modified_base 27: mod_base = cm
  modified_base 28: mod_base = OTHER; note = locked nucleic acid
  modified_base 29: mod_base = um
  modified_base 30: mod_base = gm
  modified_base 31: mod_base = gm
  modified_base 32: mod_base = OTHER; note = locked nucleic acid
  modified_base 33: mod_base = cm
  misc_feature 1..27: note = At this position backbone is RNA
  misc_feature 29..33: note = At this position backbone is RNA
gccaggtaagtatagcggccgtccatcttggac

SEQ ID NO: 112 - RNA, 33 nt, synthetic construct
  misc_feature 1..33: note = Description of sequence: bifunctional oligonucleotide
  source 1..33: mol_type = other RNA
  modified_base 1: mod_base = gm
  modified_base 2: mod_base = cm
  modified_base 3: mod_base = cm
  modified_base 4: mod_base = OTHER; note = 2'O-methyl-adenosine
  modified_base 5: mod_base = gm
  modified_base 6: mod_base = gm
  modified_base 7: mod_base = um
  modified_base 8: mod_base = OTHER; note = 2'O-methyl-adenosine
  modified_base 9: mod_base = OTHER; note = 2'O-methyl-adenosine
  modified_base 10: mod_base = gm
  modified_base 11: mod_base = um
  modified_base 12: mod_base = OTHER; note = 2'O-methyl-adenosine
  modified_base 13: mod_base = um
  modified_base 14: mod_base = gm
  modified_base 15: mod_base = OTHER; note = 2'O-methyl-adenosine
  modified_base 16: mod_base = OTHER; note = locked nucleic acid
  modified_base 17: mod_base = cm
  modified_base 18: mod_base = gm
  modified_base 19: mod_base = gm
  modified_base 20: mod_base = OTHER; note = locked nucleic acid
  modified_base 21: mod_base = cm
  modified_base 22: mod_base = gm
  modified_base 23: mod_base = um
  modified_base 24: mod_base = OTHER; note = locked nucleic acid
  modified_base 25: mod_base = cm
  modified_base 26: mod_base = OTHER; note = 2'O-methyl-adenosine
  modified_base 27: mod_base = um
  modified_base 28: mod_base = OTHER; note = locked nucleic acid
  modified_base 29: mod_base = um
  modified_base 30: mod_base = um
  modified_base 31: mod_base = gm
  modified_base 32: mod_base = OTHER; note = locked nucleic acid
  modified_base 33: mod_base = OTHER; note = 2'O-methyl-adenosine
gccaggtaagtatgagcggccgtccatcttgga

SEQ ID NO: 113 - DNA, 33 bp, synthetic construct
  misc_feature 1..33: note = Description of sequence: bifunctional oligonucleotide
  source 1..33: mol_type = other DNA
  modified_base 1: mod_base = gm
  modified_base 2: mod_base = cm
  modified_base 3: mod_base = cm
  modified_base 4: mod_base = OTHER; note = 2'O-methyl-adenosine
  modified_base 5: mod_base = gm
  modified_base 6: mod_base = gm
  modified_base 7: mod_base = um
  modified_base 8: mod_base = OTHER; note = 2'O-methyl-adenosine
  modified_base 9: mod_base = OTHER; note = 2'O-methyl-adenosine
  modified_base 10: mod_base = gm
  modified_base 11: mod_base = um
  modified_base 12: mod_base = OTHER; note = 2'O-methyl-adenosine
  modified_base 13: mod_base = um
  modified_base 14: mod_base = um
  modified_base 15: mod_base = gm
  modified_base 16: mod_base = OTHER; note = locked nucleic acid
  modified_base 17: mod_base = gm
  modified_base 18: mod_base = cm
  modified_base 19: mod_base = gm
  modified_base 20: mod_base = OTHER; note = locked nucleic acid
  modified_base 21: mod_base = cm
  modified_base 22: mod_base = cm
  modified_base 23: mod_base = gm
  modified_base 24: mod_base = OTHER; note = locked nucleic acid
  modified_base 25: mod_base = cm
  modified_base 26: mod_base = cm
  modified_base 27: mod_base = OTHER; note = 2'O-methyl-adenosine
  modified_base 28: mod_base = OTHER; note = locked nucleic acid
  modified_base 29: mod_base = cm
  modified_base 30: mod_base = um
  modified_base 31: mod_base = um
  modified_base 32: mod_base = OTHER; note = locked nucleic acid
  modified_base 33: mod_base = gm
  misc_feature 1..23: note = At this position backbone is RNA
  misc_feature 25..27: note = At this position backbone is RNA
  misc_feature 29..33: note = At this position backbone is RNA
gccaggtaagtattgagcggccgtccatcttgg

SEQ ID NO: 114 - DNA, 33 bp, synthetic construct
  misc_feature 1..33: note = Description of sequence: bifunctional oligonucleotide
  source 1..33: mol_type = other DNA
  modified_base 1: mod_base = gm
  modified_base 2: mod_base = cm
  modified_base 3: mod_base = cm
  modified_base 4: mod_base = OTHER; note = 2'O-methyl-adenosine
  modified_base 5: mod_base = gm
  modified_base 6: mod_base = gm
  modified_base 7: mod_base = um
  modified_base 8: mod_base = OTHER; note = 2'O-methyl-adenosine
  modified_base 9: mod_base = OTHER; note = 2'O-methyl-adenosine
  modified_base 10: mod_base = gm
  modified_base 11: mod_base = um
  modified_base 12: mod_base = OTHER; note = 2'O-methyl-adenosine
  modified_base 13: mod_base = um
  modified_base 14: mod_base = cm
  modified_base 15: mod_base = um
  modified_base 16: mod_base = OTHER; note = locked nucleic acid
  modified_base 17: mod_base = OTHER; note = 2'O-methyl-adenosine
  modified_base 18: mod_base = gm
  modified_base 19: mod_base = cm
  modified_base 20: mod_base = OTHER; note = locked nucleic acid
  modified_base 21: mod_base = gm
  modified_base 22: mod_base = cm
  modified_base 23: mod_base = cm
  modified_base 24: mod_base = OTHER; note = locked nucleic acid
  modified_base 25: mod_base = um
  modified_base 26: mod_base = cm
  modified_base 27: mod_base = cm
  modified_base 28: mod_base = OTHER; note = locked nucleic acid
  modified_base 29: mod_base = um
  modified_base 30: mod_base = cm
  modified_base 31: mod_base = um
  modified_base 32: mod_base = OTHER; note = locked nucleic acid
  modified_base 33: mod_base = gm
  misc_feature 1..31: note = At this position backbone is RNA
  misc_feature 33: note = At this position backbone is RNA
gccaggtaagtatctgagcggccgtccatcttg

SEQ ID NO: 115 - DNA, 33 bp, synthetic construct
  misc_feature 1..33: note = Description of sequence: bifunctional oligonucleotide
  source 1..33: mol_type = other DNA
  modified_base 1: mod_base = gm
  modified_base 2: mod_base = cm
  modified_base 3: mod_base = cm
  modified_base 4: mod_base = OTHER; note = 2'O-methyl-adenosine
  modified_base 5: mod_base = gm
  modified_base 6: mod_base = gm
  modified_base 7: mod_base = um
  modified_base 8: mod_base = OTHER; note = 2'O-methyl-adenosine
  modified_base 9: mod_base = OTHER; note = 2'O-methyl-adenosine
  modified_base 10: mod_base = gm
  modified_base 11: mod_base = um
  modified_base 12: mod_base = OTHER; note = 2'O-methyl-adenosine
  modified_base 13: mod_base = um
  modified_base 14: mod_base = cm
  modified_base 15: mod_base = cm
  modified_base 16: mod_base = OTHER; note = locked nucleic acid
  modified_base 17: mod_base = gm
  modified_base 18: mod_base = OTHER; note = 2'O-methyl-adenosine
  modified_base 19: mod_base = gm
  modified_base 20: mod_base = OTHER; note = locked nucleic acid
  modified_base 21: mod_base = gm
  modified_base 22: mod_base = gm
  modified_base 23: mod_base = cm
  modified_base 24: mod_base = OTHER; note = locked nucleic acid
  modified_base 25: mod_base = gm
  modified_base 26: mod_base = um
  modified_base 27: mod_base = cm
  modified_base 28: mod_base = OTHER; note = locked nucleic acid
  modified_base 29: mod_base = OTHER; note = 2'O-methyl-adenosine
  modified_base 30: mod_base = um
  modified_base 31: mod_base = cm
  modified_base 32: mod_base = OTHER; note = locked nucleic acid
  modified_base 33: mod_base = um
  misc_feature 1..15: note = At this position backbone is RNA
  misc_feature 17..31: note = At this position backbone is RNA
  misc_feature 33: note = At this position backbone is RNA
gccaggtaagtatcctgagcggccgtccatctt

SEQ ID NO: 116 - RNA, 33 nt, synthetic construct
  misc_feature 1..33: note = Description of sequence: bifunctional oligonucleotide
  source 1..33: mol_type = other RNA
  modified_base 1: mod_base = gm
  modified_base 2: mod_base = cm
  modified_base 3: mod_base = cm
  modified_base 4: mod_base = OTHER; note = 2'O-methyl-adenosine
  modified_base 5: mod_base = gm
  modified_base 6: mod_base = gm
  modified_base 7: mod_base = um
  modified_base 8: mod_base = OTHER; note = 2'O-methyl-adenosine
  modified_base 9: mod_base = OTHER; note = 2'O-methyl-adenosine
  modified_base 10: mod_base = gm
  modified_base 11: mod_base = um
  modified_base 12: mod_base = OTHER; note = 2'O-methyl-adenosine
  modified_base 13: mod_base = um
  modified_base 14: mod_base = OTHER; note = 2'O-methyl-adenosine
  modified_base 15: mod_base = cm
  modified_base 16: mod_base = OTHER; note = locked nucleic acid
  modified_base 17: mod_base = um
  modified_base 18: mod_base = gm
  modified_base 19: mod_base = OTHER; note = 2'O-methyl-adenosine
  modified_base 20: mod_base = OTHER; note = locked nucleic acid
  modified_base 21: mod_base = cm
  modified_base 22: mod_base = gm
  modified_base 23: mod_base = gm
  modified_base 24: mod_base = OTHER; note = locked nucleic acid
  modified_base 25: mod_base = cm
  modified_base 26: mod_base = gm
  modified_base 27: mod_base = um
  modified_base 28: mod_base = OTHER; note = locked nucleic acid
  modified_base 29: mod_base = cm
  modified_base 30: mod_base = OTHER; note = 2'O-methyl-adenosine
  modified_base 31: mod_base = um
  modified_base 32: mod_base = OTHER; note = locked nucleic acid
  modified_base 33: mod_base = um
gccaggtaagtatacctgagcggccgtccatct

SEQ ID NO: 117 - DNA, 33 bp, synthetic construct
  misc_feature 1..33: note = Description of sequence: bifunctional oligonucleotide
  source 1..33: mol_type = other DNA
  modified_base 1: mod_base = gm
  modified_base 2: mod_base = cm
  modified_base 3: mod_base = cm
  modified_base 4: mod_base = OTHER; note = 2'O-methyl-adenosine
  modified_base 5: mod_base = gm
  modified_base 6: mod_base = gm
  modified_base 7: mod_base = um
  modified_base 8: mod_base = OTHER; note = 2'O-methyl-adenosine
  modified_base 9: mod_base = OTHER; note = 2'O-methyl-adenosine
  modified_base 10: mod_base = gm
  modified_base 11: mod_base = um
  modified_base 12: mod_base = OTHER; note = 2'O-methyl-adenosine
  modified_base 13: mod_base = um
  modified_base 14: mod_base = OTHER; note = 2'O-methyl-adenosine
  modified_base 15: mod_base = OTHER; note = 2'O-methyl-adenosine
  modified_base 16: mod_base = OTHER; note = locked nucleic acid
  modified_base 17: mod_base = cm
  modified_base 18: mod_base = um
  modified_base 19: mod_base = gm
  modified_base 20: mod_base = OTHER; note = locked nucleic acid
  modified_base 21: mod_base = gm
  modified_base 22: mod_base = cm
  modified_base 23: mod_base = gm
  modified_base 24: mod_base = OTHER; note = locked nucleic acid
  modified_base 25: mod_base = cm
  modified_base 26: mod_base = cm
  modified_base 27: mod_base = gm
  modified_base 28: mod_base = OTHER; note = locked nucleic acid
  modified_base 29: mod_base = cm
  modified_base 30: mod_base = cm
  modified_base 31: mod_base = OTHER; note = 2'O-methyl-adenosine
  modified_base 32: mod_base = OTHER; note = locked nucleic acid
  modified_base 33: mod_base = cm
  misc_feature 1..27: note = At this position backbone is RNA
  misc_feature 29..31: note = At this position backbone is RNA
  misc_feature 33: note = At this position backbone is RNA
gccaggtaagtataacctgagcggccgtccatc

SEQ ID NO: 118 - RNA, 33 nt, synthetic construct
  misc_feature 1..33: note = Description of sequence: bifunctional oligonucleotide
  source 1..33: mol_type = other RNA
  modified_base 1: mod_base = gm
  modified_base 2: mod_base = cm
  modified_base 3: mod_base = cm
  modified_base 4: mod_base = OTHER; note = 2'O-methyl-adenosine
  modified_base 5: mod_base = gm
  modified_base 6: mod_base = gm
  modified_base 7: mod_base = um
  modified_base 8: mod_base = OTHER; note = 2'O-methyl-adenosine
  modified_base 9: mod_base = OTHER; note = 2'O-methyl-adenosine
  modified_base 10: mod_base = gm
  modified_base 11: mod_base = um
  modified_base 12: mod_base = OTHER; note = 2'O-methyl-adenosine
  modified_base 13: mod_base = um
  modified_base 14: mod_base = gm
  modified_base 15: mod_base = OTHER; note = 2'O-methyl-adenosine
  modified_base 16: mod_base = OTHER; note = locked nucleic acid
  modified_base 17: mod_base = cm
  modified_base 18: mod_base = cm
  modified_base 19: mod_base = um
  modified_base 20: mod_base = OTHER; note = locked nucleic acid
  modified_base 21: mod_base = OTHER; note = 2'O-methyl-adenosine
  modified_base 22: mod_base = gm
  modified_base 23: mod_base = cm
  modified_base 24: mod_base = OTHER; note = locked nucleic acid
  modified_base 25: mod_base = gm
  modified_base 26: mod_base = cm
  modified_base 27: mod_base = cm
  modified_base 28: mod_base = OTHER; note = locked nucleic acid
  modified_base 29: mod_base = um
  modified_base 30: mod_base = cm
  modified_base 31: mod_base = cm
  modified_base 32: mod_base = OTHER; note = locked nucleic acid
  modified_base 33: mod_base = um
gccaggtaagtatgaacctgagcggccgtccat

SEQ ID NO: 119 - DNA, 33 bp, synthetic construct
  misc_feature 1..33: note = Description of sequence: bifunctional oligonucleotide
  source 1..33: mol_type = other DNA
  modified_base 1: mod_base = gm
  modified_base 2: mod_base = cm
  modified_base 3: mod_base = cm
  modified_base 4: mod_base = OTHER; note = 2'O-methyl-adenosine
  modified_base 5: mod_base = gm
  modified_base 6: mod_base = gm
  modified_base 7: mod_base = um
  modified_base 8: mod_base = OTHER; note = 2'O-methyl-adenosine
  modified_base 9: mod_base = OTHER; note = 2'O-methyl-adenosine
  modified_base 10: mod_base = gm
  modified_base 11: mod_base = um
  modified_base 12: mod_base = OTHER; note = 2'O-methyl-adenosine
  modified_base 13: mod_base = um
  modified_base 14: mod_base = OTHER; note = 2'O-methyl-adenosine
  modified_base 15: mod_base = gm
  modified_base 16: mod_base = OTHER; note = locked nucleic acid
  modified_base 17: mod_base = OTHER; note = 2'O-methyl-adenosine
  modified_base 18: mod_base = cm
  modified_base 19: mod_base = cm
  modified_base 20: mod_base = OTHER; note = locked nucleic acid
  modified_base 21: mod_base = gm
  modified_base 22: mod_base = OTHER; note = 2'O-methyl-adenosine
  modified_base 23: mod_base = gm
  modified_base 24: mod_base = OTHER; note = locked nucleic acid
  modified_base 25: mod_base = gm
  modified_base 26: mod_base = gm
  modified_base 27: mod_base = cm
  modified_base 28: mod_base = OTHER; note = locked nucleic acid
  modified_base 29: mod_base = gm
  modified_base 30: mod_base = um
  modified_base 31: mod_base = cm
  modified_base 32: mod_base = OTHER; note = locked nucleic acid
  modified_base 33: mod_base = OTHER; note = 2'O-methyl-adenosine
  misc_feature 1..19: note = At this position backbone is RNA
  misc_feature 21..33: note = At this position backbone is RNA
gccaggtaagtatagaacctgagcggccgtcca

SEQ ID NO: 120 - RNA, 33 nt, synthetic construct
  misc_feature 1..33: note = Description of sequence: bifunctional oligonucleotide
  source 1..33: mol_type = other RNA
  modified_base 1: mod_base = gm
  modified_base 2: mod_base = cm
  modified_base 3: mod_base = cm
  modified_base 4: mod_base = OTHER; note = 2'O-methyl-adenosine
  modified_base 5: mod_base = gm
  modified_base 6: mod_base = gm
  modified_base 7: mod_base = um
  modified_base 8: mod_base = OTHER; note = 2'O-methyl-adenosine
  modified_base 9: mod_base = OTHER; note = 2'O-methyl-adenosine
  modified_base 10: mod_base = gm
  modified_base 11: mod_base = um
  modified_base 12: mod_base = OTHER; note = 2'O-methyl-adenosine
  modified_base 13: mod_base = um
  modified_base 14: mod_base = cm
  modified_base 15: mod_base = OTHER; note = 2'O-methyl-adenosine
  modified_base 16: mod_base = OTHER; note = locked nucleic acid
  modified_base 17: mod_base = OTHER; note = 2'O-methyl-adenosine
  modified_base 18: mod_base = OTHER; note = 2'O-methyl-adenosine
  modified_base 19: mod_base = cm
  modified_base 20: mod_base = OTHER; note = locked nucleic acid
  modified_base 21: mod_base = um
  modified_base 22: mod_base = gm
  modified_base 23: mod_base = OTHER; note = 2'O-methyl-adenosine
  modified_base 24: mod_base = OTHER; note = locked nucleic acid
  modified_base 25: mod_base = cm
  modified_base 26: mod_base = gm
  modified_base 27: mod_base = gm
  modified_base 28: mod_base = OTHER; note = locked nucleic acid
  modified_base 29: mod_base = cm
  modified_base 30: mod_base = gm
  modified_base 31: mod_base = um
  modified_base 32: mod_base = OTHER; note = locked nucleic acid
  modified_base 33: mod_base = cm
gccaggtaagtatcagaacctgagcggccgtcc

SEQ ID NO: 121 - DNA, 33 bp, synthetic construct
  misc_feature 1..33: note = Description of sequence: bifunctional oligonucleotide
  source 1..33: mol_type = other DNA
  modified_base 1: mod_base = gm
  modified_base 2: mod_base = cm
  modified_base 3: mod_base = cm
  modified_base 4: mod_base = OTHER; note = 2'O-methyl-adenosine
  modified_base 5: mod_base = gm
  modified_base 6: mod_base = gm
  modified_base 7: mod_base = um
  modified_base 8: mod_base = OTHER; note = 2'O-methyl-adenosine
  modified_base 9: mod_base = OTHER; note = 2'O-methyl-adenosine
  modified_base 10: mod_base = gm
  modified_base 11: mod_base = um
  modified_base 12: mod_base = OTHER; note = 2'O-methyl-adenosine
  modified_base 13: mod_base = um
  modified_base 14: mod_base = gm
  modified_base 15: mod_base = cm
  modified_base 16: mod_base = OTHER; note = locked nucleic acid
  modified_base 17: mod_base = gm
  modified_base 18: mod_base = OTHER; note = 2'O-methyl-adenosine
  modified_base 19: mod_base = OTHER; note = 2'O-methyl-adenosine
  modified_base 20: mod_base = OTHER; note = locked nucleic acid
  modified_base 21: mod_base = cm
  modified_base 22: mod_base = um
  modified_base 23: mod_base = gm
  modified_base 24: mod_base = OTHER; note = locked nucleic acid
  modified_base 25: mod_base = gm
  modified_base 26: mod_base = cm
  modified_base 27: mod_base = gm
  modified_base 28: mod_base = OTHER; note = locked nucleic acid
  modified_base 29: mod_base = cm
  modified_base 30: mod_base = cm
  modified_base 31: mod_base = gm
  modified_base 32: mod_base = OTHER; note = locked nucleic acid
  modified_base 33: mod_base = cm
  misc_feature 1..31: note = At this position backbone is RNA
  misc_feature 33: note = At this position backbone is RNA
gccaggtaagtatgcagaacctgagcggccgtc

SEQ ID NO: 122 - RNA, 33 nt, synthetic construct
  misc_feature 1..33: note = Description of sequence: bifunctional oligonucleotide
  source 1..33: mol_type = other RNA
  modified_base 1: mod_base = gm
  modified_base 2: mod_base = cm
  modified_base 3: mod_base = cm
  modified_base 4: mod_base = OTHER; note = 2'O-methyl-adenosine
  modified_base 5: mod_base = gm
  modified_base 6: mod_base = gm
  modified_base 7: mod_base = um
  modified_base 8: mod_base = OTHER; note = 2'O-methyl-adenosine
  modified_base 9: mod_base = OTHER; note = 2'O-methyl-adenosine
  modified_base 10: mod_base = gm
  modified_base 11: mod_base = um
  modified_base 12: mod_base = OTHER; note = 2'O-methyl-adenosine
  modified_base 13: mod_base = um
  modified_base 14: mod_base = OTHER; note = 2'O-methyl-adenosine
  modified_base 15: mod_base = gm
  modified_base 16: mod_base = OTHER; note = locked nucleic acid
  modified_base 17: mod_base = OTHER; note = 2'O-methyl-adenosine
  modified_base 18: mod_base = gm
  modified_base 19: mod_base = OTHER; note = 2'O-methyl-adenosine
  modified_base 20: mod_base = OTHER; note = locked nucleic acid
  modified_base 21: mod_base = cm
  modified_base 22: mod_base = cm
  modified_base 23: mod_base = um
  modified_base 24: mod_base = OTHER; note = locked nucleic acid
  modified_base 25: mod_base = OTHER; note = 2'O-methyl-adenosine
  modified_base 26: mod_base = gm
  modified_base 27: mod_base = cm
  modified_base 28: mod_base = OTHER; note = locked nucleic acid
  modified_base 29: mod_base = gm
  modified_base 30: mod_base = cm
  modified_base 31: mod_base = cm
  modified_base 32: mod_base = OTHER; note = locked nucleic acid
  modified_base 33: mod_base = um
gccaggtaagtatagcagaacctgagcggccgt

SEQ ID NO: 123 - DNA, 33 bp, synthetic construct
  misc_feature 1..33: note = Description of sequence: bifunctional oligonucleotide
  source 1..33: mol_type = other DNA
  modified_base 1: mod_base = gm
  modified_base 2: mod_base = cm
  modified_base 3: mod_base = cm
  modified_base 4: mod_base = OTHER; note = 2'O-methyl-adenosine
  modified_base 5: mod_base = gm
  modified_base 6: mod_base = gm
  modified_base 7: mod_base = um
  modified_base 8: mod_base = OTHER; note = 2'O-methyl-adenosine
  modified_base 9: mod_base = OTHER; note = 2'O-methyl-adenosine
  modified_base 10: mod_base = gm
  modified_base 11: mod_base = um
  modified_base 12: mod_base = OTHER; note = 2'O-methyl-adenosine
  modified_base 13: mod_base = um
  modified_base 14: mod_base = OTHER; note = 2'O-methyl-adenosine
  modified_base 15: mod_base = OTHER; note = 2'O-methyl-adenosine
  modified_base 16: mod_base = OTHER; note = locked nucleic acid
  modified_base 17: mod_base = cm
  modified_base 18: mod_base = OTHER; note = 2'O-methyl-adenosine
  modified_base 19: mod_base = gm
  modified_base 20: mod_base = OTHER; note = locked nucleic acid
  modified_base 21: mod_base = OTHER; note = 2'O-methyl-adenosine
  modified_base 22: mod_base = cm
  modified_base 23: mod_base = cm
  modified_base 24: mod_base = OTHER; note = locked nucleic acid
  modified_base 25: mod_base = gm
  modified_base 26: mod_base = OTHER; note = 2'O-methyl-adenosine
  modified_base 27: mod_base = gm
  modified_base 28: mod_base = OTHER; note = locked nucleic acid
  modified_base 29: mod_base = gm
  modified_base 30: mod_base = gm
  modified_base 31: mod_base = cm
  modified_base 32: mod_base = OTHER; note = locked nucleic acid
  modified_base 33: mod_base = gm
  misc_feature 1..23: note = At this position backbone is RNA
  misc_feature 25..33: note = At this position backbone is RNA
gccaggtaagtataagcagaacctgagcggccg

SEQ ID NO: 124 - RNA, 33 nt, synthetic construct
  misc_feature 1..33: note = Description of sequence: bifunctional oligonucleotide
  source 1..33: mol_type = other RNA
  modified_base 1: mod_base = gm
  modified_base 2: mod_base = cm
  modified_base 3: mod_base = cm
  modified_base 4: mod_base = OTHER; note = 2'O-methyl-adenosine
  modified_base 5: mod_base = gm
  modified_base 6: mod_base = gm
  modified_base 7: mod_base = um
  modified_base 8: mod_base = OTHER; note = 2'O-methyl-adenosine
  modified_base 9: mod_base = OTHER; note = 2'O-methyl-adenosine
  modified_base 10: mod_base = gm
  modified_base 11: mod_base = um
  modified_base 12: mod_base = OTHER; note = 2'O-methyl-adenosine
  modified_base 13: mod_base = um
  modified_base 14: mod_base = OTHER; note = 2'O-methyl-adenosine
  modified_base 15: mod_base = OTHER; note = 2'O-methyl-adenosine
  modified_base 16: mod_base = OTHER; note = locked nucleic acid
  modified_base 17: mod_base = gm
  modified_base 18: mod_base = cm
  modified_base 19: mod_base = OTHER; note = 2'O-methyl-adenosine
  modified_base 20: mod_base = OTHER; note = locked nucleic acid
  modified_base 21: mod_base = OTHER; note = 2'O-methyl-adenosine
  modified_base 22: mod_base = OTHER; note = 2'O-methyl-adenosine
  modified_base 23: mod_base = cm
  modified_base 24: mod_base = OTHER; note = locked nucleic acid
  modified_base 25: mod_base = um
  modified_base 26: mod_base = gm
  modified_base 27: mod_base = OTHER; note = 2'O-methyl-adenosine
  modified_base 28: mod_base = OTHER; note = locked nucleic acid
  modified_base 29: mod_base = cm
  modified_base 30: mod_base = gm
  modified_base 31: mod_base = gm
  modified_base 32: mod_base = OTHER; note = locked nucleic acid
  modified_base 33: mod_base = cm
gccaggtaagtataaagcagaacctgagcggcc

SEQ ID NO: 125 - RNA, 33 nt, synthetic construct
  misc_feature 1..33: note = Description of sequence: bifunctional oligonucleotide
  source 1..33: mol_type = other RNA
  modified_base 1: mod_base = gm
  modified_base 2: mod_base = cm
  modified_base 3: mod_base = cm
  modified_base 4: mod_base = OTHER; note = 2'O-methyl-adenosine
  modified_base 5: mod_base = gm
  modified_base 6: mod_base = gm
  modified_base 7: mod_base = um
  modified_base 8: mod_base = OTHER; note = 2'O-methyl-adenosine
  modified_base 9: mod_base = OTHER; note = 2'O-methyl-adenosine
  modified_base 10: mod_base = gm
  modified_base 11: mod_base = um
  modified_base 12: mod_base = OTHER; note = 2'O-methyl-adenosine
  modified_base 13: mod_base = um
  modified_base 14: mod_base = OTHER; note = 2'O-methyl-adenosine
  modified_base 15: mod_base = OTHER; note = 2'O-methyl-adenosine
  modified_base 16: mod_base = OTHER; note = locked nucleic acid
  modified_base 17: mod_base = OTHER; note = 2'O-methyl-adenosine
  modified_base 18: mod_base = gm
  modified_base 19: mod_base = cm
  modified_base 20: mod_base = OTHER; note = locked nucleic acid
  modified_base 21: mod_base = gm
  modified_base 22: mod_base = OTHER; note = 2'O-methyl-adenosine
  modified_base 23: mod_base = OTHER; note = 2'O-methyl-adenosine
  modified_base 24: mod_base = OTHER; note = locked nucleic acid
  modified_base 25: mod_base = cm
  modified_base 26: mod_base = um
  modified_base 27: mod_base = gm
  modified_base 28: mod_base = OTHER; note = locked nucleic acid
  modified_base 29: mod_base = gm
  modified_base 30: mod_base = cm
  modified_base 31: mod_base = gm
  modified_base 32: mod_base = OTHER; note = locked nucleic acid
  modified_base 33: mod_base = cm
gccaggtaagtataaaagcagaacctgagcggc

SEQ ID NO: 126 - RNA, 33 nt, synthetic construct
  misc_feature 1..33: note = Description of sequence: bifunctional oligonucleotide
  source 1..33: mol_type = other RNA
  modified_base 1: mod_base = gm
  modified_base 2: mod_base = cm
  modified_base 3: mod_base = cm
  modified_base 4: mod_base = OTHER; note = 2'O-methyl-adenosine
  modified_base 5: mod_base = gm
  modified_base 6: mod_base = gm
  modified_base 7: mod_base = um
  modified_base 8: mod_base = OTHER; note = 2'O-methyl-adenosine
  modified_base 9: mod_base = OTHER; note = 2'O-methyl-adenosine
  modified_base 10: mod_base = gm
  modified_base 11: mod_base = um
  modified_base 12: mod_base = OTHER; note = 2'O-methyl-adenosine
  modified_base 13: mod_base = um
  modified_base 14: mod_base = um
  modified_base 15: mod_base = OTHER; note = 2'O-methyl-adenosine
  modified_base 16: mod_base = OTHER; note = locked nucleic acid
  modified_base 17: mod_base = OTHER; note = 2'O-methyl-adenosine
  modified_base 18: mod_base = OTHER; note = 2'O-methyl-adenosine
  modified_base 19: mod_base = gm
  modified_base 20: mod_base = OTHER; note = locked nucleic acid
  modified_base 21: mod_base = OTHER; note = 2'O-methyl-adenosine
  modified_base 22: mod_base = gm
  modified_base 23: mod_base = OTHER; note = 2'O-methyl-adenosine
  modified_base 24: mod_base = OTHER; note = locked nucleic acid
  modified_base 25: mod_base = cm
  modified_base 26: mod_base = cm
  modified_base 27: mod_base = um
  modified_base 28: mod_base = OTHER; note = locked nucleic acid
  modified_base 29: mod_base = OTHER; note = 2'O-methyl-adenosine
  modified_base 30: mod_base = gm
  modified_base 31: mod_base = cm
  modified_base 32: mod_base = OTHER; note = locked nucleic acid
  modified_base 33: mod_base = gm
gccaggtaagtattaaaagcagaacctgagcgg

SEQ ID NO: 127 - DNA, 33 bp, synthetic construct
  misc_feature 1..33: note = Description of sequence: bifunctional oligonucleotide
  source 1..33: mol_type = other DNA
  modified_base 1: mod_base = gm
  modified_base 2: mod_base = cm
  modified_base 3: mod_base = cm
  modified_base 4: mod_base = OTHER; note = 2'O-methyl-adenosine
  modified_base 5: mod_base = gm
  modified_base 6: mod_base = gm
  modified_base 7: mod_base = um
  modified_base 8: mod_base = OTHER; note = 2'O-methyl-adenosine
  modified_base 9: mod_base = OTHER; note = 2'O-methyl-adenosine
  modified_base 10: mod_base = gm
  modified_base 11: mod_base = um
  modified_base 12: mod_base = OTHER; note = 2'O-methyl-adenosine
  modified_base 13: mod_base = um
  modified_base 14: mod_base = gm
  modified_base 15: mod_base = um
  modified_base 16: mod_base = OTHER; note = locked nucleic acid
  modified_base 17: mod_base = OTHER; note = 2'O-methyl-adenosine
  modified_base 18: mod_base = OTHER; note = 2'O-methyl-adenosine
  modified_base 19: mod_base = OTHER; note = 2'O-methyl-adenosine
  modified_base 20: mod_base = OTHER; note = locked nucleic acid
  modified_base 21: mod_base = cm
  modified_base 22: mod_base = OTHER; note = 2'O-methyl-adenosine
  modified_base 23: mod_base = gm
  modified_base 24: mod_base = OTHER; note = locked nucleic acid
  modified_base 25: mod_base = OTHER; note = 2'O-methyl-adenosine
  modified_base 26: mod_base = cm
  modified_base 27: mod_base = cm
  modified_base 28: mod_base = OTHER; note = locked nucleic acid
  modified_base 29: mod_base = gm
  modified_base 30: mod_base = OTHER; note = 2'O-methyl-adenosine
  modified_base 31: mod_base = gm
  modified_base 32: mod_base = OTHER; note = locked nucleic acid
  modified_base 33: mod_base = gm
  misc_feature 1..27: note = At this position backbone is RNA
  misc_feature 29..33: note = At this position backbone is RNA
gccaggtaagtatgtaaaagcagaacctgagcg

SEQ ID NO: 128 - DNA, 33 bp, synthetic construct
  misc_feature 1..33: note = Description of sequence: bifunctional oligonucleotide
  source 1..33: mol_type = other DNA
  modified_base 1: mod_base = gm
  modified_base 2: mod_base = cm
  modified_base 3: mod_base = cm
  modified_base 4: mod_base = OTHER; note = 2'O-methyl-adenosine
  modified_base 5: mod_base = gm
  modified_base 6: mod_base = gm
  modified_base 7: mod_base = um
  modified_base 8: mod_base = OTHER; note = 2'O-methyl-adenosine
  modified_base 9: mod_base = OTHER; note = 2'O-methyl-adenosine
  modified_base 10: mod_base = gm
  modified_base 11: mod_base = um
  modified_base 12: mod_base = OTHER; note = 2'O-methyl-adenosine
  modified_base 13: mod_base = um
  modified_base 14: mod_base = gm
  modified_base 15: mod_base = gm
  modified_base 16: mod_base = OTHER; note = locked nucleic acid
  modified_base 17: mod_base = OTHER; note = 2'O-methyl-adenosine
  modified_base 18: mod_base = OTHER; note = 2'O-methyl-adenosine
  modified_base 19: mod_base = OTHER; note = 2'O-methyl-adenosine
  modified_base 20: mod_base = OTHER; note = locked nucleic acid
  modified_base 21: mod_base = gm
  modified_base 22: mod_base = cm
  modified_base 23: mod_base = OTHER; note = 2'O-methyl-adenosine
  modified_base 24: mod_base = OTHER; note = locked nucleic acid
  modified_base 25: mod_base = OTHER; note = 2'O-methyl-adenosine
  modified_base 26: mod_base = OTHER; note = 2'O-methyl-adenosine
  modified_base 27: mod_base = cm
  modified_base 28: mod_base = OTHER; note = locked nucleic acid
  modified_base 29: mod_base = um
  modified_base 30: mod_base = gm
  modified_base 31: mod_base = OTHER; note = 2'O-methyl-adenosine
  modified_base 32: mod_base = OTHER; note = locked nucleic acid
  modified_base 33: mod_base = cm
  misc_feature 1..15: note = At this position backbone is RNA
  misc_feature 17..33: note = At this position backbone is RNA
gccaggtaagtatggtaaaagcagaacctgagc

SEQ ID NO: 129 - RNA, 33 nt, synthetic construct
  misc_feature 1..33: note = Description of sequence: bifunctional oligonucleotide
  source 1..33: mol_type = other RNA
  modified_base 1: mod_base = gm
  modified_base 2: mod_base = cm
  modified_base 3: mod_base = cm
  modified_base 4: mod_base = OTHER; note = 2'O-methyl-adenosine
  modified_base 5: mod_base = gm
  modified_base 6: mod_base = gm
  modified_base 7: mod_base = um
  modified_base 8: mod_base = OTHER; note = 2'O-methyl-adenosine
  modified_base 9: mod_base = OTHER; note = 2'O-methyl-adenosine
  modified_base 10: mod_base = gm
  modified_base 11: mod_base = um
  modified_base 12: mod_base = OTHER; note = 2'O-methyl-adenosine
  modified_base 13: mod_base = um
  modified_base 14: mod_base = OTHER; note = 2'O-methyl-adenosine
  modified_base 15: mod_base = gm
  modified_base 16: mod_base = OTHER; note = locked nucleic acid
  modified_base 17: mod_base = um
  modified_base 18: mod_base = OTHER; note = 2'O-methyl-adenosine
  modified_base 19: mod_base = OTHER; note = 2'O-methyl-adenosine
  modified_base 20: mod_base = OTHER; note = locked nucleic acid
  modified_base 21: mod_base = OTHER; note = 2'O-methyl-adenosine
  modified_base 22: mod_base = gm
  modified_base 23: mod_base = cm
  modified_base 24: mod_base = OTHER; note = locked nucleic acid
  modified_base 25: mod_base = gm
  modified_base 26: mod_base = OTHER; note = 2'O-methyl-adenosine
  modified_base 27: mod_base = OTHER; note = 2'O-methyl-adenosine
  modified_base 28: mod_base = OTHER; note = locked nucleic acid
  modified_base 29: mod_base = cm
  modified_base 30: mod_base = um
  modified_base 31: mod_base = gm
  modified_base 32: mod_base = OTHER; note = locked nucleic acid
  modified_base 33: mod_base = gm
gccaggtaagtataggtaaaagcagaacctgag

SEQ ID NO: 130 - RNA, 33 nt, synthetic construct
  misc_feature 1..33: note = Description of sequence: bifunctional oligonucleotide
  source 1..33: mol_type = other RNA
  modified_base 1: mod_base = gm
  modified_base 2: mod_base = cm
  modified_base 3: mod_base = cm
  modified_base 4: mod_base = OTHER; note = 2'O-methyl-adenosine
  modified_base 5: mod_base = gm
  modified_base 6: mod_base = gm
  modified_base 7: mod_base = um
  modified_base 8: mod_base = OTHER; note = 2'O-methyl-adenosine
  modified_base 9: mod_base = OTHER; note = 2'O-methyl-adenosine
  modified_base 10: mod_base = gm
  modified_base 11: mod_base = um
  modified_base 12: mod_base = OTHER; note = 2'O-methyl-adenosine
  modified_base 13: mod_base = um
  modified_base 14: mod_base = cm
  modified_base 15: mod_base = OTHER; note = 2'O-methyl-adenosine
  modified_base 16: mod_base = OTHER; note = locked nucleic acid
  modified_base 17: mod_base = gm
  modified_base 18: mod_base = um
  modified_base 19: mod_base = OTHER; note = 2'O-methyl-adenosine
  modified_base 20: mod_base = OTHER; note = locked nucleic acid
  modified_base 21: mod_base = OTHER; note = 2'O-methyl-adenosine
  modified_base 22: mod_base = OTHER; note = 2'O-methyl-adenosine
  modified_base 23: mod_base = gm
  modified_base 24: mod_base = OTHER; note = locked nucleic acid
  modified_base 25: mod_base = OTHER; note = 2'O-methyl-adenosine
  modified_base 26: mod_base = gm
  modified_base 27: mod_base = OTHER; note = 2'O-methyl-adenosine
  modified_base 28: mod_base = OTHER; note = locked nucleic acid
  modified_base 29: mod_base = cm
  modified_base 30: mod_base = cm
  modified_base 31: mod_base = um
  modified_base 32: mod_base = OTHER; note = locked nucleic acid
  modified_base 33: mod_base = OTHER; note = 2'O-methyl-adenosine
gccaggtaagtatcaggtaaaagcagaacctga

SEQ ID NO: 131 - DNA, 33 bp, synthetic construct
  misc_feature 1..33: note = Description of sequence: bifunctional oligonucleotide
  source 1..33: mol_type = other DNA
  modified_base 1: mod_base = gm
  modified_base 2: mod_base = cm
  modified_base 3: mod_base = cm
  modified_base 4: mod_base = OTHER; note = 2'O-methyl-adenosine
  modified_base 5: mod_base = gm
  modified_base 6: mod_base = gm
  modified_base 7: mod_base = um
  modified_base 8: mod_base = OTHER; note = 2'O-methyl-adenosine
  modified_base 9: mod_base = OTHER; note = 2'O-methyl-adenosine
  modified_base 10: mod_base = gm
  modified_base 11: mod_base = um
  modified_base 12: mod_base = OTHER; note = 2'O-methyl-adenosine
  modified_base 13: mod_base = um
  modified_base 14: mod_base = gm
  modified_base 15: mod_base = cm
  modified_base 16: mod_base = OTHER; note = locked nucleic acid
  modified_base 17: mod_base = gm
  modified_base 18: mod_base = gm
  modified_base 19: mod_base = um
  modified_base 20: mod_base = OTHER; note = locked nucleic acid
  modified_base 21: mod_base = OTHER; note = 2'O-methyl-adenosine
  modified_base 22: mod_base = OTHER; note = 2'O-methyl-adenosine
  modified_base 23: mod_base = OTHER; note = 2'O-methyl-adenosine
  modified_base 24: mod_base = OTHER; note = locked nucleic acid
  modified_base 25: mod_base = cm
  modified_base 26: mod_base = OTHER; note = 2'O-methyl-adenosine
  modified_base 27: mod_base = gm
  modified_base 28: mod_base = OTHER; note = locked nucleic acid
  modified_base 29: mod_base = OTHER; note = 2'O-methyl-adenosine
  modified_base 30: mod_base = cm
  modified_base 31: mod_base = cm
  modified_base 32: mod_base = OTHER; note = locked nucleic acid
  modified_base 33: mod_base = gm
  misc_feature 1..31: note = At this position backbone is RNA
  misc_feature 33: note = At this position backbone is RNA
gccaggtaagtatgcaggtaaaagcagaacctg

SEQ ID NO: 132 - DNA, 33 bp, synthetic construct
  misc_feature 1..33: note = Description of sequence: bifunctional oligonucleotide
  source 1..33: mol_type = other DNA
  modified_base 1: mod_base = gm
  modified_base 2: mod_base = cm
  modified_base 3: mod_base = cm
  modified_base 4: mod_base = OTHER; note = 2'O-methyl-adenosine
  modified_base 5: mod_base = gm
  modified_base 6: mod_base = gm
  modified_base 7: mod_base = um
  modified_base 8: mod_base = OTHER; note = 2'O-methyl-adenosine
  modified_base 9: mod_base = OTHER; note = 2'O-methyl-adenosine
  modified_base 10: mod_base = gm
  modified_base 11: mod_base = um
  modified_base 12: mod_base = OTHER; note = 2'O-methyl-adenosine
  modified_base 13: mod_base = um
  modified_base 14: mod_base = cm
  modified_base 15: mod_base = gm
  modified_base 16: mod_base = OTHER; note = locked nucleic acid
  modified_base 17: mod_base = OTHER; note = 2'O-methyl-adenosine
  modified_base 18: mod_base = gm
  modified_base 19: mod_base = gm
  modified_base 20: mod_base = OTHER; note = locked nucleic acid
  modified_base 21: mod_base = OTHER; note = 2'O-methyl-adenosine
  modified_base 22: mod_base = OTHER; note = 2'O-methyl-adenosine
  modified_base 23: mod_base = OTHER; note = 2'O-methyl-adenosine
  modified_base 24: mod_base = OTHER; note = locked nucleic acid
  modified_base 25: mod_base = gm
  modified_base 26: mod_base = cm
  modified_base 27: mod_base = OTHER; note = 2'O-methyl-adenosine
  modified_base 28: mod_base = OTHER; note = locked nucleic acid
  modified_base 29: mod_base = OTHER; note = 2'O-methyl-adenosine
  modified_base 30: mod_base = OTHER; note = 2'O-methyl-adenosine
  modified_base 31: mod_base = cm
  modified_base 32: mod_base = OTHER; note = locked nucleic acid
  modified_base 33: mod_base = um
  misc_feature 1..19: note = At this position backbone is RNA
  misc_feature 21..33: note = At this position backbone is RNA
gccaggtaagtatcgcaggtaaaagcagaacct

SEQ ID NO: 133 - RNA, 33 nt, synthetic construct
  misc_feature 1..33: note = Description of sequence: bifunctional oligonucleotide
  source 1..33: mol_type = other RNA
  modified_base 1: mod_base = gm
  modified_base 2: mod_base = cm
  modified_base 3: mod_base = cm
  modified_base 4: mod_base = OTHER; note = 2'O-methyl-adenosine
  modified_base 5: mod_base = gm
  modified_base 6: mod_base = gm
  modified_base 7: mod_base = um
  modified_base 8: mod_base = OTHER; note = 2'O-methyl-adenosine
  modified_base 9: mod_base = OTHER; note = 2'O-methyl-adenosine
  modified_base 10: mod_base = gm
  modified_base 11: mod_base = um
  modified_base 12: mod_base = OTHER; note = 2'O-methyl-adenosine
  modified_base 13: mod_base = um
  modified_base 14: mod_base = cm
  modified_base 15: mod_base = cm
  modified_base 16: mod_base = OTHER; note = locked nucleic acid
  modified_base 17: mod_base = cm
  modified_base 18: mod_base = OTHER; note = 2'O-methyl-adenosine
  modified_base 19: mod_base = gm
  modified_base 20: mod_base = OTHER; note = locked nucleic acid
  modified_base 21: mod_base = um
  modified_base 22: mod_base = OTHER; note = 2'O-methyl-adenosine
  modified_base 23: mod_base = OTHER; note = 2'O-methyl-adenosine
  modified_base 24: mod_base = OTHER; note = locked nucleic acid
  modified_base 25: mod_base = OTHER; note = 2'O-methyl-adenosine
  modified_base 26: mod_base = gm
  modified_base 27: mod_base = cm
  modified_base 28: mod_base = OTHER; note = locked nucleic acid
  modified_base 29: mod_base = gm
  modified_base 30: mod_base = OTHER; note = 2'O-methyl-adenosine
  modified_base 31: mod_base = OTHER; note = 2'O-methyl-adenosine
  modified_base 32: mod_base = OTHER; note = locked nucleic acid
  modified_base 33: mod_base = cm
gccaggtaagtatccgcaggtaaaagcagaacc

SEQ ID NO: 134 - RNA, 33 nt, synthetic construct
  misc_feature 1..33: note = Description of sequence: bifunctional oligonucleotide
  source 1..33: mol_type = other RNA
  modified_base 1: mod_base = gm
  modified_base 2: mod_base = cm
  modified_base 3: mod_base = cm
  modified_base 4: mod_base = OTHER; note = 2'O-methyl-adenosine
  modified_base 5: mod_base = gm
  modified_base 6: mod_base = gm
  modified_base 7: mod_base = um
  modified_base 8: mod_base = OTHER; note = 2'O-methyl-adenosine
  modified_base 9: mod_base = OTHER; note = 2'O-methyl-adenosine
  modified_base 10: mod_base = gm
  modified_base 11: mod_base = um
  modified_base 12: mod_base = OTHER; note = 2'O-methyl-adenosine
  modified_base 13: mod_base = um
  modified_base 14: mod_base = gm
  modified_base 15: mod_base = cm
  modified_base 16: mod_base = OTHER; note = locked nucleic acid
  modified_base 17: mod_base = gm
  modified_base 18: mod_base = cm
  modified_base 19: mod_base = OTHER; note = 2'O-methyl-adenosine
  modified_base 20: mod_base = OTHER; note = locked nucleic acid
  modified_base 21: mod_base = gm
  modified_base 22: mod_base = um
  modified_base 23: mod_base = OTHER; note = 2'O-methyl-adenosine
  modified_base 24: mod_base = OTHER; note = locked nucleic acid
  modified_base 25: mod_base = OTHER; note = 2'O-methyl-adenosine
  modified_base 26: mod_base = OTHER; note = 2'O-methyl-adenosine
  modified_base 27: mod_base = gm
  modified_base 28: mod_base = OTHER; note = locked nucleic acid
  modified_base 29: mod_base = OTHER; note = 2'O-methyl-adenosine
  modified_base 30: mod_base = gm
  modified_base 31: mod_base = OTHER; note = 2'O-methyl-adenosine
  modified_base 32: mod_base = OTHER; note = locked nucleic acid
  modified_base 33: mod_base = cm
gccaggtaagtatgccgcaggtaaaagcagaac

SEQ ID NO: 135 - RNA, 33 nt, synthetic construct
  misc_feature 1..33: note = Description of sequence: bifunctional oligonucleotide
  source 1..33: mol_type = other RNA
  modified_base 1: mod_base = gm
  modified_base 2: mod_base = cm
  modified_base 3: mod_base = cm
  modified_base 4: mod_base = OTHER; note = 2'O-methyl-adenosine
  modified_base 5: mod_base = gm
  modified_base 6: mod_base = gm
  modified_base 7: mod_base = um
  modified_base 8: mod_base = OTHER; note = 2'O-methyl-adenosine
  modified_base 9: mod_base = OTHER; note = 2'O-methyl-adenosine
  modified_base 10: mod_base = gm
  modified_base 11: mod_base = um
  modified_base 12: mod_base = OTHER; note = 2'O-methyl-adenosine
  modified_base 13: mod_base = um
  modified_base 14: mod_base = gm
  modified_base 15: mod_base = gm
  modified_base 16: mod_base = OTHER; note = locked nucleic acid
  modified_base 17: mod_base = cm
  modified_base 18: mod_base = gm
  modified_base 19: mod_base = cm
  modified_base 20: mod_base = OTHER; note = locked nucleic acid
  modified_base 21: mod_base = gm
  modified_base 22: mod_base = gm
  modified_base 23: mod_base = um
  modified_base 24: mod_base = OTHER; note = locked nucleic acid
  modified_base 25: mod_base = OTHER; note = 2'O-methyl-adenosine
  modified_base 26: mod_base = OTHER; note = 2'O-methyl-adenosine
  modified_base 27: mod_base = OTHER; note = 2'O-methyl-adenosine
  modified_base 28: mod_base = OTHER; note = locked nucleic acid
  modified_base 29: mod_base = cm
  modified_base 30: mod_base = OTHER; note = 2'O-methyl-adenosine
  modified_base 31: mod_base = gm
  modified_base 32: mod_base = OTHER; note = locked nucleic acid
  modified_base 33: mod_base = OTHER; note = 2'O-methyl-adenosine
gccaggtaagtatggccgcaggtaaaagcagaa

SEQ ID NO: 136 - DNA, 33 bp, synthetic construct
  misc_feature 1..33: note = Description of sequence: bifunctional oligonucleotide
  source 1..33: mol_type = other DNA
  modified_base 1: mod_base = gm
  modified_base 2: mod_base = cm
  modified_base 3: mod_base = cm
  modified_base 4: mod_base = OTHER; note = 2'O-methyl-adenosine
  modified_base 5: mod_base = gm
  modified_base 6: mod_base = gm
  modified_base 7: mod_base = um
  modified_base 8: mod_base = OTHER; note = 2'O-methyl-adenosine
  modified_base 9: mod_base = OTHER; note = 2'O-methyl-adenosine
  modified_base 10: mod_base = gm
  modified_base 11: mod_base = um
  modified_base 12: mod_base = OTHER; note = 2'O-methyl-adenosine
  modified_base 13: mod_base = um
  modified_base 14: mod_base = gm
  modified_base 15: mod_base = gm
  modified_base 16: mod_base = OTHER; note = locked nucleic acid
  modified_base 17: mod_base = cm
  modified_base 18: mod_base = cm
  modified_base 19: mod_base = gm
  modified_base 20: mod_base = OTHER; note = locked nucleic acid
  modified_base 21: mod_base = OTHER; note = 2'O-methyl-adenosine
  modified_base 22: mod_base = gm
  modified_base 23: mod_base = gm
  modified_base 24: mod_base = OTHER; note = locked nucleic acid
  modified_base 25: mod_base = OTHER; note = 2'O-methyl-adenosine
  modified_base 26: mod_base = OTHER; note = 2'O-methyl-adenosine
  modified_base 27: mod_base = OTHER; note = 2'O-methyl-adenosine
  modified_base 28: mod_base = OTHER; note = locked nucleic acid
  modified_base 29: mod_base = gm
  modified_base 30: mod_base = cm
  modified_base 31: mod_base = OTHER; note = 2'O-methyl-adenosine
  modified_base 32: mod_base = OTHER; note = locked nucleic acid
  modified_base 33: mod_base = OTHER; note = 2'O-methyl-adenosine
  misc_feature 1..23: note = At this position backbone is RNA
  misc_feature 25..33: note = At this position backbone is RNA
gccaggtaagtatgggccgcaggtaaaagcaga

SEQ ID NO: 137 - RNA, 33 nt, synthetic construct
  misc_feature 1..33: note = Description of sequence: bifunctional oligonucleotide
  source 1..33: mol_type = other RNA
  modified_base 1: mod_base = gm
  modified_base 2: mod_base = cm
  modified_base 3: mod_base = cm
  modified_base 4: mod_base = OTHER; note = 2'O-methyl-adenosine
  modified_base 5: mod_base = gm
  modified_base 6: mod_base = gm
  modified_base 7: mod_base = um
  modified_base 8: mod_base = OTHER; note = 2'O-methyl-adenosine
  modified_base 9: mod_base = OTHER; note = 2'O-methyl-adenosine
  modified_base 10: mod_base = gm
  modified_base 11: mod_base = um
  modified_base 12: mod_base = OTHER; note = 2'O-methyl-adenosine
  modified_base 13: mod_base = um
  modified_base 14: mod_base = um
  modified_base 15: mod_base = gm
  modified_base 16: mod_base = OTHER; note = locked nucleic acid
  modified_base 17: mod_base = gm
  modified_base 18: mod_base = cm
  modified_base 19: mod_base = cm
  modified_base 20: mod_base = OTHER; note = locked nucleic acid
  modified_base 21: mod_base = cm
  modified_base 22: mod_base = OTHER; note = 2'O-methyl-adenosine
  modified_base 23: mod_base = gm
  modified_base 24: mod_base = OTHER; note = locked nucleic acid
  modified_base 25: mod_base = um
  modified_base 26: mod_base = OTHER; note = 2'O-methyl-adenosine
  modified_base 27: mod_base = OTHER; note = 2'O-methyl-adenosine
  modified_base 28: mod_base = OTHER; note = locked nucleic acid
  modified_base 29: mod_base = OTHER; note = 2'O-methyl-adenosine
  modified_base 30: mod_base = gm
  modified_base 31: mod_base = cm
  modified_base 32: mod_base = OTHER; note = locked nucleic acid
  modified_base 33: mod_base = gm
gccaggtaagtattgggccgcaggtaaaagcag

SEQ ID NO: 138 - RNA, 33 nt, synthetic construct
  misc_feature 1..33: note = Description of sequence: bifunctional oligonucleotide
  source 1..33: mol_type = other RNA
  modified_base 1: mod_base = gm
  modified_base 2: mod_base = cm
  modified_base 3: mod_base = cm
  modified_base 4: mod_base = OTHER; note = 2'O-methyl-adenosine
  modified_base 5: mod_base = gm
  modified_base 6: mod_base = gm
  modified_base 7: mod_base = um
  modified_base 8: mod_base = OTHER; note = 2'O-methyl-adenosine
  modified_base 9: mod_base = OTHER; note = 2'O-methyl-adenosine
  modified_base 10: mod_base = gm
  modified_base 11: mod_base = um
  modified_base 12: mod_base = OTHER; note = 2'O-methyl-adenosine
  modified_base 13: mod_base = um
  modified_base 14: mod_base = cm
  modified_base 15: mod_base = um
  modified_base 16: mod_base = OTHER; note = locked nucleic acid
  modified_base 17: mod_base = gm
  modified_base 18: mod_base = gm
  modified_base 19: mod_base = cm
  modified_base 20: mod_base = OTHER; note = locked nucleic acid
  modified_base 21: mod_base = gm
  modified_base 22: mod_base = cm
  modified_base 23: mod_base = OTHER; note = 2'O-methyl-adenosine
  modified_base 24: mod_base = OTHER; note = locked nucleic acid
  modified_base 25: mod_base = gm
  modified_base 26: mod_base = um
  modified_base 27: mod_base = OTHER; note = 2'O-methyl-adenosine
  modified_base 28: mod_base = OTHER; note = locked nucleic acid
  modified_base 29: mod_base = OTHER; note = 2'O-methyl-adenosine
  modified_base 30: mod_base = OTHER; note = 2'O-methyl-adenosine
  modified_base 31: mod_base = gm
  modified_base 32: mod_base = OTHER; note = locked nucleic acid
  modified_base 33: mod_base = OTHER; note = 2'O-methyl-adenosine
gccaggtaagtatctgggccgcaggtaaaagca

SEQ ID NO: 139 - DNA, 33 bp, synthetic construct
  misc_feature 1..33: note = Description of sequence: bifunctional oligonucleotide
  source 1..33: mol_type = other DNA
  modified_base 1: mod_base = gm
  modified_base 2: mod_base = cm
  modified_base 3: mod_base = cm
  modified_base 4: mod_base = OTHER; note = 2'O-methyl-adenosine
  modified_base 5: mod_base = gm
  modified_base 6: mod_base = gm
  modified_base 7: mod_base = um
  modified_base 8: mod_base = OTHER; note = 2'O-methyl-adenosine
  modified_base 9: mod_base = OTHER; note = 2'O-methyl-adenosine
  modified_base 10: mod_base = gm
  modified_base 11: mod_base = um
  modified_base 12: mod_base = OTHER; note = 2'O-methyl-adenosine
  modified_base 13: mod_base = um
  modified_base 14: mod_base = um
  modified_base 15: mod_base = cm
  modified_base 16: mod_base = OTHER; note = locked nucleic acid
  modified_base 17: mod_base = gm
  modified_base 18: mod_base = gm
  modified_base 19: mod_base = gm
  modified_base 20: mod_base = OTHER; note = locked nucleic acid
  modified_base 21: mod_base = cm
  modified_base 22: mod_base = gm
  modified_base 23: mod_base = cm
  modified_base 24: mod_base = OTHER; note = locked nucleic acid
  modified_base 25: mod_base = gm
  modified_base 26: mod_base = gm
  modified_base 27: mod_base = um
  modified_base 28: mod_base = OTHER; note = locked nucleic acid
  modified_base 29: mod_base = OTHER; note = 2'O-methyl-adenosine
  modified_base 30: mod_base = OTHER; note = 2'O-methyl-adenosine
  modified_base 31: mod_base = OTHER; note = 2'O-methyl-adenosine
  modified_base 32: mod_base = OTHER; note = locked nucleic acid
  modified_base 33: mod_base = cm
  misc_feature 1..15: note = At this position backbone is RNA
  misc_feature 17..33: note = At this position backbone is RNA
gccaggtaagtattctgggccgcaggtaaaagc

SEQ ID NO: 140 - DNA, 33 bp, synthetic construct
  misc_feature 1..33: note = Description of sequence: bifunctional oligonucleotide
  source 1..33: mol_type = other DNA
  modified_base 1: mod_base = gm
  modified_base 2: mod_base = cm
  modified_base 3: mod_base = cm
  modified_base 4: mod_base = OTHER; note = 2'O-methyl-adenosine
  modified_base 5: mod_base = gm
  modified_base 6: mod_base = gm
  modified_base 7: mod_base = um
  modified_base 8: mod_base = OTHER; note = 2'O-methyl-adenosine
  modified_base 9: mod_base = OTHER; note = 2'O-methyl-adenosine
  modified_base 10: mod_base = gm
  modified_base 11: mod_base = um
  modified_base 12: mod_base = OTHER; note = 2'O-methyl-adenosine
  modified_base 13: mod_base = um
  modified_base 14: mod_base = cm
  modified_base 15: mod_base = um
  modified_base 16: mod_base = OTHER; note = locked nucleic acid
  modified_base 17: mod_base = um
  modified_base 18: mod_base = gm
  modified_base 19: mod_base = gm
  modified_base 20: mod_base = OTHER; note = locked nucleic acid
  modified_base 21: mod_base = cm
  modified_base 22: mod_base = cm
  modified_base 23: mod_base = gm
  modified_base 24: mod_base = OTHER; note = locked nucleic acid
  modified_base 25: mod_base = OTHER; note = 2'O-methyl-adenosine
  modified_base 26: mod_base = gm
  modified_base 27: mod_base = gm
  modified_base 28: mod_base = OTHER; note = locked nucleic acid
  modified_base 29: mod_base = OTHER; note = 2'O-methyl-adenosine
  modified_base 30: mod_base = OTHER; note = 2'O-methyl-adenosine
  modified_base 31: mod_base = OTHER; note = 2'O-methyl-adenosine
  modified_base 32: mod_base = OTHER; note = locked nucleic acid
  modified_base 33: mod_base = gm
  misc_feature 1..27: note = At this position backbone is RNA
  misc_feature 29..33: note = At this position backbone is RNA
gccaggtaagtatctctgggccgcaggtaaaag

SEQ ID NO: 141 - DNA, 33 bp, synthetic construct
  misc_feature 1..33: note = Description of sequence: bifunctional oligonucleotide
  source 1..33: mol_type = other DNA
  modified_base 1: mod_base = gm
  modified_base 2: mod_base = cm
  modified_base 3: mod_base = cm
  modified_base 4: mod_base = OTHER; note = 2'O-methyl-adenosine
  modified_base 5: mod_base = gm
  modified_base 6: mod_base = gm
  modified_base 7: mod_base = um
  modified_base 8: mod_base = OTHER; note = 2'O-methyl-adenosine
  modified_base 9: mod_base = OTHER; note = 2'O-methyl-adenosine
  modified_base 10: mod_base = gm
  modified_base 11: mod_base = um
  modified_base 12: mod_base = OTHER; note = 2'O-methyl-adenosine
  modified_base 13: mod_base = um
  modified_base 14: mod_base = gm
  modified_base 15: mod_base = cm
  modified_base 16: mod_base = OTHER; note = locked nucleic acid
  modified_base 17: mod_base = cm
  modified_base 18: mod_base = um
  modified_base 19: mod_base = gm
  modified_base 20: mod_base = OTHER; note = locked nucleic acid
  modified_base 21: mod_base = gm
  modified_base 22: mod_base = cm
  modified_base 23: mod_base = cm
  modified_base 24: mod_base = OTHER; note = locked nucleic acid
  modified_base 25: mod_base = cm
  modified_base 26: mod_base = OTHER; note = 2'O-methyl-adenosine
  modified_base 27: mod_base = gm
  modified_base 28: mod_base = OTHER; note = locked nucleic acid
  modified_base 29: mod_base = um
  modified_base 30: mod_base = OTHER; note = 2'O-methyl-adenosine
  modified_base 31: mod_base = OTHER; note = 2'O-methyl-adenosine
  modified_base 32: mod_base = OTHER; note = locked nucleic acid
  modified_base 33: mod_base = OTHER; note = 2'O-methyl-adenosine
  misc_feature 1..15: note = At this position backbone is RNA
  misc_feature 17..33: note = At this position backbone is RNA
gccaggtaagtatgctctgggccgcaggtaaaa

SEQ ID NO: 142 - RNA, 33 nt, synthetic construct
  misc_feature 1..33: note = Description of sequence: bifunctional oligonucleotide
  source 1..33: mol_type = other RNA
  modified_base 1: mod_base = gm
  modified_base 2: mod_base = cm
  modified_base 3: mod_base = cm
  modified_base 4: mod_base = OTHER; note = 2'O-methyl-adenosine
  modified_base 5: mod_base = gm
  modified_base 6: mod_base = gm
  modified_base 7: mod_base = um
  modified_base 8: mod_base = OTHER; note = 2'O-methyl-adenosine
  modified_base 9: mod_base = OTHER; note = 2'O-methyl-adenosine
  modified_base 10: mod_base = gm
  modified_base 11: mod_base = um
  modified_base 12: mod_base = OTHER; note = 2'O-methyl-adenosine
  modified_base 13: mod_base = um
  modified_base 14: mod_base = gm
  modified_base 15: mod_base = gm
  modified_base 16: mod_base = OTHER; note = locked nucleic acid
  modified_base 17: mod_base = um
  modified_base 18: mod_base = cm
  modified_base 19: mod_base = um
  modified_base 20: mod_base = OTHER; note = locked nucleic acid
  modified_base 21: mod_base = gm
  modified_base 22: mod_base = gm
  modified_base 23: mod_base = cm
  modified_base 24: mod_base = OTHER; note = locked nucleic acid
  modified_base 25: mod_base = gm
  modified_base 26: mod_base = cm
  modified_base 27: mod_base = OTHER; note = 2'O-methyl-adenosine
  modified_base 28: mod_base = OTHER; note = locked nucleic acid
  modified_base 29: mod_base = gm
  modified_base 30: mod_base = um
  modified_base 31: mod_base = OTHER; note = 2'O-methyl-adenosine
  modified_base 32: mod_base = OTHER; note = locked nucleic acid
  modified_base 33: mod_base = OTHER; note = 2'O-methyl-adenosine
gccaggtaagtatggctctgggccgcaggtaaa

SEQ ID NO: 143 - DNA, 33 bp, synthetic construct
  misc_feature 1..33: note = Description of sequence: bifunctional oligonucleotide
  source 1..33: mol_type = other DNA
  modified_base 1: mod_base = gm
  modified_base 2: mod_base = cm
  modified_base 3: mod_base = cm
  modified_base 4: mod_base = OTHER; note = 2'O-methyl-adenosine
  modified_base 5: mod_base = gm
  modified_base 6: mod_base = gm
  modified_base 7: mod_base = um
  modified_base 8: mod_base = OTHER; note = 2'O-methyl-adenosine
  modified_base 9: mod_base = OTHER; note = 2'O-methyl-adenosine
  modified_base 10: mod_base = gm
  modified_base 11: mod_base = um
  modified_base 12: mod_base = OTHER; note = 2'O-methyl-adenosine
  modified_base 13: mod_base = um
  modified_base 14: mod_base = gm
  modified_base 15: mod_base = gm
  modified_base 16: mod_base = OTHER; note = locked nucleic acid
  modified_base 17: mod_base = cm
  modified_base 18: mod_base = um
  modified_base 19: mod_base = cm
  modified_base 20: mod_base = OTHER; note = locked nucleic acid
  modified_base 21: mod_base = gm
  modified_base 22: mod_base = gm
  modified_base 23: mod_base = gm
  modified_base 24: mod_base = OTHER; note = locked nucleic acid
  modified_base 25: mod_base = cm
  modified_base 26: mod_base = gm
  modified_base 27: mod_base = cm
  modified_base 28: mod_base = OTHER; note = locked nucleic acid
  modified_base 29: mod_base = gm
  modified_base 30: mod_base = gm
  modified_base 31: mod_base = um
  modified_base 32: mod_base = OTHER; note = locked nucleic acid
  modified_base 33: mod_base = OTHER; note = 2'O-methyl-adenosine
  misc_feature 1..19: note = At this position backbone is RNA
  misc_feature 21..33: note = At this position backbone is RNA
gccaggtaagtatgggctctgggccgcaggtaa

SEQ ID NO: 144 - RNA, 33 nt, synthetic construct
  misc_feature 1..33: note = Description of sequence: bifunctional oligonucleotide
  source 1..33: mol_type = other RNA
  modified_base 1: mod_base = gm
  modified_base 2: mod_base = cm
  modified_base 3: mod_base = cm
  modified_base 4: mod_base = OTHER; note = 2'O-methyl-adenosine
  modified_base 5: mod_base = gm
  modified_base 6: mod_base = gm
  modified_base 7: mod_base = um
  modified_base 8: mod_base = OTHER; note = 2'O-methyl-adenosine
  modified_base 9: mod_base = OTHER; note = 2'O-methyl-adenosine
  modified_base 10: mod_base = gm
  modified_base 11: mod_base = um
  modified_base 12: mod_base = OTHER; note = 2'O-methyl-adenosine
  modified_base 13: mod_base = um
  modified_base 14: mod_base = um
  modified_base 15: mod_base = cm
  modified_base 16: mod_base = OTHER; note = locked nucleic acid
  modified_base 17: mod_base = cm
  modified_base 18: mod_base = gm
  modified_base 19: mod_base = gm
  modified_base 20: mod_base = OTHER; note = locked nucleic acid
  modified_base 21: mod_base = gm
  modified_base 22: mod_base = cm
  modified_base 23: mod_base = cm
  modified_base 24: mod_base = OTHER; note = locked nucleic acid
  modified_base 25: mod_base = cm
  modified_base 26: mod_base = um
  modified_base 27: mod_base = cm
  modified_base 28: mod_base = OTHER; note = locked nucleic acid
  modified_base 29: mod_base = gm
  modified_base 30: mod_base = cm
  modified_base 31: mod_base = OTHER; note = 2'O-methyl-adenosine
  modified_base 32: mod_base = OTHER; note = locked nucleic acid
  modified_base 33: mod_base = cm
gccaggtaagtattcgcggcgccgctcagcacc

SEQ ID NO: 145 - RNA, 33 nt, synthetic construct
  misc_feature 1..33: note = Description of sequence: bifunctional oligonucleotide
  source 1..33: mol_type = other RNA
  modified_base 1: mod_base = gm
  modified_base 2: mod_base = cm
  modified_base 3: mod_base = cm
  modified_base 4: mod_base = OTHER; note = 2'O-methyl-adenosine
  modified_base 5: mod_base = gm
  modified_base 6: mod_base = gm
  modified_base 7: mod_base = um
  modified_base 8: mod_base = OTHER; note = 2'O-methyl-adenosine
  modified_base 9: mod_base = OTHER; note = 2'O-methyl-adenosine
  modified_base 10: mod_base = gm
  modified_base 11: mod_base = um
  modified_base 12: mod_base = OTHER; note = 2'O-methyl-adenosine
  modified_base 13: mod_base = um
  modified_base 14: mod_base = cm
  modified_base 15: mod_base = um
  modified_base 16: mod_base = OTHER; note = locked nucleic acid
  modified_base 17: mod_base = gm
  modified_base 18: mod_base = cm
  modified_base 19: mod_base = gm
  modified_base 20: mod_base = OTHER; note = locked nucleic acid
  modified_base 21: mod_base = cm
  modified_base 22: mod_base = gm
  modified_base 23: mod_base = cm
  modified_base 24: mod_base = OTHER; note = locked nucleic acid
  modified_base 25: mod_base = gm
  modified_base 26: mod_base = cm
  modified_base 27: mod_base = um
  modified_base 28: mod_base = OTHER; note = locked nucleic acid
  modified_base 29: mod_base = OTHER; note = 2'O-methyl-adenosine
  modified_base 30: mod_base = gm
  modified_base 31: mod_base = cm
  modified_base 32: mod_base = OTHER; note = locked nucleic acid
  modified_base 33: mod_base = cm
gccaggtaagtatctcgcggcgccgctcagcac

SEQ ID NO: 146 - DNA, 33 bp, synthetic construct
  misc_feature 1..33: note = Description of sequence: bifunctional oligonucleotide
  source 1..33: mol_type = other DNA
  modified_base 1: mod_base = gm
  modified_base 2: mod_base = cm
  modified_base 3: mod_base = cm
  modified_base 4: mod_base = OTHER; note = 2'O-methyl-adenosine
  modified_base 5: mod_base = gm
  modified_base 6: mod_base = gm
  modified_base 7: mod_base = um
  modified_base 8: mod_base = OTHER; note = 2'O-methyl-adenosine
  modified_base 9: mod_base = OTHER; note = 2'O-methyl-adenosine
  modified_base 10: mod_base = gm
  modified_base 11: mod_base = um
  modified_base 12: mod_base = OTHER; note = 2'O-methyl-adenosine
  modified_base 13: mod_base = um
  modified_base 14: mod_base = OTHER; note = 2'O-methyl-adenosine
  modified_base 15: mod_base = cm
  modified_base 16: mod_base = OTHER; note = locked nucleic acid
  modified_base 17: mod_base = cm
  modified_base 18: mod_base = gm
  modified_base 19: mod_base = cm
  modified_base 20: mod_base = OTHER; note = locked nucleic acid
  modified_base 21: mod_base = gm
  modified_base 22: mod_base = cm
  modified_base 23: mod_base = gm
  modified_base 24: mod_base = OTHER; note = locked nucleic acid
  modified_base 25: mod_base = cm
  modified_base 26: mod_base = gm
  modified_base 27: mod_base = cm
  modified_base 28: mod_base = OTHER; note = locked nucleic acid
  modified_base 29: mod_base = cm
  modified_base 30: mod_base = OTHER; note = 2'O-methyl-adenosine
  modified_base 31: mod_base = gm
  modified_base 32: mod_base = OTHER; note = locked nucleic acid
  modified_base 33: mod_base = OTHER; note = 2'O-methyl-adenosine
  misc_feature 1..15: note = At this position backbone is RNA
  misc_feature 17..27: note = At this position backbone is RNA
  misc_feature 29..33: note = At this position backbone is RNA
gccaggtaagtatactcgcggcgccgctcagca

SEQ ID NO: 147 - RNA, 33 nt, synthetic construct
  misc_feature 1..33: note = Description of sequence: bifunctional oligonucleotide
  source 1..33: mol_type = other RNA
  modified_base 1: mod_base = gm
  modified_base 2: mod_base = cm
  modified_base 3: mod_base = cm
  modified_base 4: mod_base = OTHER; note = 2'O-methyl-adenosine
  modified_base 5: mod_base = gm
  modified_base 6: mod_base = gm
  modified_base 7: mod_base = um
  modified_base 8: mod_base = OTHER; note = 2'O-methyl-adenosine
  modified_base 9: mod_base = OTHER; note = 2'O-methyl-adenosine
  modified_base 10: mod_base = gm
  modified_base 11: mod_base = um
  modified_base 12: mod_base = OTHER; note = 2'O-methyl-adenosine
  modified_base 13: mod_base = um
  modified_base 14: mod_base = gm
  modified_base 15: mod_base = OTHER; note = 2'O-methyl-adenosine
  modified_base 16: mod_base = OTHER; note = locked nucleic acid
  modified_base 17: mod_base = um
  modified_base 18: mod_base = cm
  modified_base 19: mod_base = gm
  modified_base 20: mod_base = OTHER; note = locked nucleic acid
  modified_base 21: mod_base = gm
  modified_base 22: mod_base = gm
  modified_base 23: mod_base = cm
  modified_base 24: mod_base = OTHER; note = locked nucleic acid
  modified_base 25: mod_base = cm
  modified_base 26: mod_base = cm
  modified_base 27: mod_base = gm
  modified_base 28: mod_base = OTHER; note = locked nucleic acid
  modified_base 29: mod_base = um
  modified_base 30: mod_base = cm
  modified_base 31: mod_base = OTHER; note = 2'O-methyl-adenosine
  modified_base 32: mod_base = OTHER; note = locked nucleic acid
  modified_base 33: mod_base = cm
gccaggtaagtatgactcgcggcgccgctcagc

SEQ ID NO: 148 - RNA, 33 nt, synthetic construct
  misc_feature 1..33: note = Description of sequence: bifunctional oligonucleotide
  source 1..33: mol_type = other RNA
  modified_base 1: mod_base = gm
  modified_base 2: mod_base = cm
  modified_base 3: mod_base = cm
  modified_base 4: mod_base = OTHER; note = 2'O-methyl-adenosine
  modified_base 5: mod_base = gm
  modified_base 6: mod_base = gm
  modified_base 7: mod_base = um
  modified_base 8: mod_base = OTHER; note = 2'O-methyl-adenosine
  modified_base 9: mod_base = OTHER; note = 2'O-methyl-adenosine
  modified_base 10: mod_base = gm
  modified_base 11: mod_base = um
  modified_base 12: mod_base = OTHER; note = 2'O-methyl-adenosine
  modified_base 13: mod_base = um
  modified_base 14: mod_base = cm
  modified_base 15: mod_base = gm
  modified_base 16: mod_base = OTHER; note = locked nucleic acid
  modified_base 17: mod_base = cm
  modified_base 18: mod_base = um
  modified_base 19: mod_base = cm
  modified_base 20: mod_base = OTHER; note = locked nucleic acid
  modified_base 21: mod_base = cm
  modified_base 22: mod_base = gm
  modified_base 23: mod_base = gm
  modified_base 24: mod_base = OTHER; note = locked nucleic acid
  modified_base 25: mod_base = gm
  modified_base 26: mod_base = cm
  modified_base 27: mod_base = cm
  modified_base 28: mod_base = OTHER; note = locked nucleic acid
  modified_base 29: mod_base = cm
  modified_base 30: mod_base = um
  modified_base 31: mod_base = cm
  modified_base 32: mod_base = OTHER; note = locked nucleic acid
  modified_base 33: mod_base = gm
gccaggtaagtatcgactcgcggcgccgctcag

SEQ ID NO: 149 - RNA, 33 nt, synthetic construct
  misc_feature 1..33: note = Description of sequence: bifunctional oligonucleotide
  source 1..33: mol_type = other RNA
  modified_base 1: mod_base = gm
  modified_base 2: mod_base = cm
  modified_base 3: mod_base = cm
  modified_base 4: mod_base = OTHER; note = 2'O-methyl-adenosine
  modified_base 5: mod_base = gm
  modified_base 6: mod_base = gm
  modified_base 7: mod_base = um
  modified_base 8: mod_base = OTHER; note = 2'O-methyl-adenosine
  modified_base 9: mod_base = OTHER; note = 2'O-methyl-adenosine
  modified_base 10: mod_base = gm
  modified_base 11: mod_base = um
  modified_base 12: mod_base = OTHER; note = 2'O-methyl-adenosine
  modified_base 13: mod_base = um
  modified_base 14: mod_base = cm
  modified_base 15: mod_base = cm
  modified_base 16: mod_base = OTHER; note = locked nucleic acid
  modified_base 17: mod_base = OTHER; note = 2'O-methyl-adenosine
  modified_base 18: mod_base = cm
  modified_base 19: mod_base = um
  modified_base 20: mod_base = OTHER; note = locked nucleic acid
  modified_base 21: mod_base = gm
  modified_base 22: mod_base = cm
  modified_base 23: mod_base = gm
  modified_base 24: mod_base = OTHER; note = locked nucleic acid
  modified_base 25: mod_base = cm
  modified_base 26: mod_base = gm
  modified_base 27: mod_base = cm
  modified_base 28: mod_base = OTHER; note = locked nucleic acid
  modified_base 29: mod_base = gm
  modified_base 30: mod_base = cm
  modified_base 31: mod_base = um
  modified_base 32: mod_base = OTHER; note = locked nucleic acid
  modified_base 33: mod_base = OTHER; note = 2'O-methyl-adenosine
gccaggtaagtatccgactcgcggcgccgctca

SEQ ID NO: 150 - RNA, 33 nt, synthetic construct
  misc_feature 1..33: note = Description of sequence: bifunctional oligonucleotide
  source 1..33: mol_type = other RNA
  modified_base 1: mod_base = gm
  modified_base 2: mod_base = cm
  modified_base 3: mod_base = cm
  modified_base 4: mod_base = OTHER; note = 2'O-methyl-adenosine
  modified_base 5: mod_base = gm
  modified_base 6: mod_base = gm
  modified_base 7: mod_base = um
  modified_base 8: mod_base = OTHER; note = 2'O-methyl-adenosine
  modified_base 9: mod_base = OTHER; note = 2'O-methyl-adenosine
  modified_base 10: mod_base = gm
  modified_base 11: mod_base = um
  modified_base 12: mod_base = OTHER; note = 2'O-methyl-adenosine
  modified_base 13: mod_base = um
  modified_base 14: mod_base = OTHER; note = 2'O-methyl-adenosine
  modified_base 15: mod_base = gm
  modified_base 16: mod_base = OTHER; note = locked nucleic acid
  modified_base 17: mod_base = cm
  modified_base 18: mod_base = cm
  modified_base 19: mod_base = um
  modified_base 20: mod_base = OTHER; note = locked nucleic acid
  modified_base 21: mod_base = gm
  modified_base 22: mod_base = gm
  modified_base 23: mod_base = gm
  modified_base 24: mod_base = OTHER; note = locked nucleic acid
  modified_base 25: mod_base = cm
  modified_base 26: mod_base = gm
  modified_base 27: mod_base = OTHER; note = 2'O-methyl-adenosine
  modified_base 28: mod_base = OTHER; note = locked nucleic acid
  modified_base 29: mod_base = um
  modified_base 30: mod_base = cm
  modified_base 31: mod_base = gm
  modified_base 32: mod_base = OTHER; note = locked nucleic acid
  modified_base 33: mod_base = gm
gccaggtaagtataggcctcgggccgactcgcg

SEQ ID NO: 151 - DNA, 33 bp, synthetic construct
  misc_feature 1..33: note = Description of sequence: bifunctional oligonucleotide
  source 1..33: mol_type = other DNA
  modified_base 1: mod_base = gm
  modified_base 2: mod_base = cm
  modified_base 3: mod_base = cm
  modified_base 4: mod_base = OTHER; note = 2'O-methyl-adenosine
  modified_base 5: mod_base = gm
  modified_base 6: mod_base = gm
  modified_base 7: mod_base = um
  modified_base 8: mod_base = OTHER; note = 2'O-methyl-adenosine
  modified_base 9: mod_base = OTHER; note = 2'O-methyl-adenosine
  modified_base 10: mod_base = gm
  modified_base 11: mod_base = um
  modified_base 12: mod_base = OTHER; note = 2'O-methyl-adenosine
  modified_base 13: mod_base = um
  modified_base 14: mod_base = gm
  modified_base 15: mod_base = OTHER; note = 2'O-methyl-adenosine
  modified_base 16: mod_base = OTHER; note = locked nucleic acid
  modified_base 17: mod_base = gm
  modified_base 18: mod_base = cm
  modified_base 19: mod_base = cm
  modified_base 20: mod_base = OTHER; note = locked nucleic acid
  modified_base 21: mod_base = cm
  modified_base 22: mod_base = gm
  modified_base 23: mod_base = gm
  modified_base 24: mod_base = OTHER; note = locked nucleic acid
  modified_base 25: mod_base = cm
  modified_base 26: mod_base = cm
  modified_base 27: mod_base = gm
  modified_base 28: mod_base = OTHER; note = locked nucleic acid
  modified_base 29: mod_base = cm
  modified_base 30: mod_base = um
  modified_base 31: mod_base = cm
  modified_base 32: mod_base = OTHER; note = locked nucleic acid
  modified_base 33: mod_base = cm
  misc_feature 1..19: note = At this position backbone is RNA
  misc_feature 21..33: note = At this position backbone is RNA
gccaggtaagtatgaggcctcgggccgactcgc

SEQ ID NO: 152 - RNA, 33 nt, synthetic construct
  misc_feature 1..33: note = Description of sequence: bifunctional oligonucleotide
  source 1..33: mol_type = other RNA
  modified_base 1: mod_base = gm
  modified_base 2: mod_base = cm
  modified_base 3: mod_base = cm
  modified_base 4: mod_base = OTHER; note = 2'O-methyl-adenosine
  modified_base 5: mod_base = gm
  modified_base 6: mod_base = gm
  modified_base 7: mod_base = um
  modified_base 8: mod_base = OTHER; note = 2'O-methyl-adenosine
  modified_base 9: mod_base = OTHER; note = 2'O-methyl-adenosine
  modified_base 10: mod_base = gm
  modified_base 11: mod_base = um
  modified_base 12: mod_base = OTHER; note = 2'O-methyl-adenosine
  modified_base 13: mod_base = um
  modified_base 14: mod_base = gm
  modified_base 15: mod_base = gm
  modified_base 16: mod_base = OTHER; note = locked nucleic acid
  modified_base 17: mod_base = gm
  modified_base 18: mod_base = gm
  modified_base 19: mod_base = cm
  modified_base 20: mod_base = OTHER; note = locked nucleic acid
  modified_base 21: mod_base = um
  modified_base 22: mod_base = cm
  modified_base 23: mod_base = gm
  modified_base 24: mod_base = OTHER; note = locked nucleic acid
  modified_base 25: mod_base = gm
  modified_base 26: mod_base = cm
  modified_base 27: mod_base = cm
  modified_base 28: mod_base = OTHER; note = locked nucleic acid
  modified_base 29: mod_base = OTHER; note = 2'O-methyl-adenosine
  modified_base 30: mod_base = cm
  modified_base 31: mod_base = um
  modified_base 32: mod_base = OTHER; note = locked nucleic acid
  modified_base 33: mod_base = gm
gccaggtaagtatggaggcctcgggccgactcg

SEQ ID NO: 153 - DNA, 33 bp, synthetic construct
  misc_feature 1..33: note = Description of sequence: bifunctional oligonucleotide
  source 1..33: mol_type = other DNA
  modified_base 1: mod_base = gm
  modified_base 2: mod_base = cm
  modified_base 3: mod_base = cm
  modified_base 4: mod_base = OTHER; note = 2'O-methyl-adenosine
  modified_base 5: mod_base = gm
  modified_base 6: mod_base = gm
  modified_base 7: mod_base = um
  modified_base 8: mod_base = OTHER; note = 2'O-methyl-adenosine
  modified_base 9: mod_base = OTHER; note = 2'O-methyl-adenosine
  modified_base 10: mod_base = gm
  modified_base 11: mod_base = um
  modified_base 12: mod_base = OTHER; note = 2'O-methyl-adenosine
  modified_base 13: mod_base = um
  modified_base 14: mod_base = cm
  modified_base 15: mod_base = gm
  modified_base 16: mod_base = OTHER; note = locked nucleic acid
  modified_base 17: mod_base = OTHER; note = 2'O-methyl-adenosine
  modified_base 18: mod_base = gm
  modified_base 19: mod_base = gm
  modified_base 20: mod_base = OTHER; note = locked nucleic acid
  modified_base 21: mod_base = cm
  modified_base 22: mod_base = um
  modified_base 23: mod_base = cm
  modified_base 24: mod_base = OTHER; note = locked nucleic acid
  modified_base 25: mod_base = gm
  modified_base 26: mod_base = gm
  modified_base 27: mod_base = cm
  modified_base 28: mod_base = OTHER; note = locked nucleic acid
  modified_base 29: mod_base = gm
  modified_base 30: mod_base = OTHER; note = 2'O-methyl-adenosine
  modified_base 31: mod_base = cm
  modified_base 32: mod_base = OTHER; note = locked nucleic acid
  modified_base 33: mod_base = cm
  misc_feature 1..31: note = At this position backbone is RNA
  misc_feature 33: note = At this position backbone is RNA
gccaggtaagtatcggaggcctcgggccgactc

SEQ ID NO: 154 - RNA, 33 nt, synthetic construct
  misc_feature 1..33: note = Description of sequence: bifunctional oligonucleotide
  source 1..33: mol_type = other RNA
  modified_base 1: mod_base = gm
  modified_base 2: mod_base = cm
  modified_base 3: mod_base = cm
  modified_base 4: mod_base = OTHER; note = 2'O-methyl-adenosine
  modified_base 5: mod_base = gm
  modified_base 6: mod_base = gm
  modified_base 7: mod_base = um
  modified_base 8: mod_base = OTHER; note = 2'O-methyl-adenosine
  modified_base 9: mod_base = OTHER; note = 2'O-methyl-adenosine
  modified_base 10: mod_base = gm
  modified_base 11: mod_base = um
  modified_base 12: mod_base = OTHER; note = 2'O-methyl-adenosine
  modified_base 13: mod_base = um
  modified_base 14: mod_base = cm
  modified_base 15: mod_base = cm
  modified_base 16: mod_base = OTHER; note = locked nucleic acid
  modified_base 17: mod_base = gm
  modified_base 18: mod_base = OTHER; note = 2'O-methyl-adenosine
  modified_base 19: mod_base = gm
  modified_base 20: mod_base = OTHER; note = locked nucleic acid
  modified_base 21: mod_base = cm
  modified_base 22: mod_base = cm
  modified_base 23: mod_base = um
  modified_base 24: mod_base = OTHER; note = locked nucleic acid
  modified_base 25: mod_base = gm
  modified_base 26: mod_base = gm
  modified_base 27: mod_base = gm
  modified_base 28: mod_base = OTHER; note = locked nucleic acid
  modified_base 29: mod_base = cm
  modified_base 30: mod_base = gm
  modified_base 31: mod_base = OTHER; note = 2'O-methyl-adenosine
  modified_base 32: mod_base = OTHER; note = locked nucleic acid
  modified_base 33: mod_base = um
gccaggtaagtatccggaggcctcgggccgact

SEQ ID NO: 155 - DNA, 33 bp, synthetic construct
  misc_feature 1..33: note = Description of sequence: bifunctional oligonucleotide
  source 1..33: mol_type = other DNA
  modified_base 1: mod_base = gm
  modified_base 2: mod_base = cm
  modified_base 3: mod_base = cm
  modified_base 4: mod_base = OTHER; note = 2'O-methyl-adenosine
  modified_base 5: mod_base = gm
  modified_base 6: mod_base = gm
  modified_base 7: mod_base = um
  modified_base 8: mod_base = OTHER; note = 2'O-methyl-adenosine
  modified_base 9: mod_base = OTHER; note = 2'O-methyl-adenosine
  modified_base 10: mod_base = gm
  modified_base 11: mod_base = um
  modified_base 12: mod_base = OTHER; note = 2'O-methyl-adenosine
  modified_base 13: mod_base = um
  modified_base 14: mod_base = OTHER; note = 2'O-methyl-adenosine
  modified_base 15: mod_base = gm
  modified_base 16: mod_base = OTHER; note = locked nucleic acid
  modified_base 17: mod_base = cm
  modified_base 18: mod_base = cm
  modified_base 19: mod_base = cm
  modified_base 20: mod_base = OTHER; note = locked nucleic acid
  modified_base 21: mod_base = gm
  modified_base 22: mod_base = gm
  modified_base 23: mod_base = OTHER; note = 2'O-methyl-adenosine
  modified_base 24: mod_base = OTHER; note = locked nucleic acid
  modified_base 25: mod_base = gm
  modified_base 26: mod_base = cm
  modified_base 27: mod_base = cm
  modified_base 28: mod_base = OTHER; note = locked nucleic acid
  modified_base 29: mod_base = cm
  modified_base 30: mod_base = gm
  modified_base 31: mod_base = gm
  modified_base 32: mod_base = OTHER; note = locked nucleic acid
  modified_base 33: mod_base = cm
  misc_feature 1..15: note = At this position backbone is RNA
  misc_feature 17..27: note = At this position backbone is RNA
  misc_feature 29..33: note = At this position backbone is RNA
gccaggtaagtatagtccccggaggcctcgggc

SEQ ID NO: 156 - RNA, 33 nt, synthetic construct
  misc_feature 1..33: note = Description of sequence: bifunctional oligonucleotide
  source 1..33: mol_type = other RNA
  modified_base 1: mod_base = gm
  modified_base 2: mod_base = cm
  modified_base 3: mod_base = cm
  modified_base 4: mod_base = OTHER; note = 2'O-methyl-adenosine
  modified_base 5: mod_base = gm
  modified_base 6: mod_base = gm
  modified_base 7: mod_base = um
  modified_base 8: mod_base = OTHER; note = 2'O-methyl-adenosine
  modified_base 9: mod_base = OTHER; note = 2'O-methyl-adenosine
  modified_base 10: mod_base = gm
  modified_base 11: mod_base = um
  modified_base 12: mod_base = OTHER; note = 2'O-methyl-adenosine
  modified_base 13: mod_base = um
  modified_base 14: mod_base = cm
  modified_base 15: mod_base = OTHER; note = 2'O-methyl-adenosine
  modified_base 16: mod_base = OTHER; note = locked nucleic acid
  modified_base 17: mod_base = um
  modified_base 18: mod_base = cm
  modified_base 19: mod_base = cm
  modified_base 20: mod_base = OTHER; note = locked nucleic acid
  modified_base 21: mod_base = cm
  modified_base 22: mod_base = gm
  modified_base 23: mod_base = gm
  modified_base 24: mod_base = OTHER; note = locked nucleic acid
  modified_base 25: mod_base = gm
  modified_base 26: mod_base = gm
  modified_base 27: mod_base = cm
  modified_base 28: mod_base = OTHER; note = locked nucleic acid
  modified_base 29: mod_base = um
  modified_base 30: mod_base = cm
  modified_base 31: mod_base = gm
  modified_base 32: mod_base = OTHER; note = locked nucleic acid
  modified_base 33: mod_base = gm
gccaggtaagtatcagtccccggaggcctcggg

SEQ ID NO: 157 - RNA, 33 nt, synthetic construct
  misc_feature 1..33: note = Description of sequence: bifunctional oligonucleotide
  source 1..33: mol_type = other RNA
  modified_base 1: mod_base = gm
  modified_base 2: mod_base = cm
  modified_base 3: mod_base = cm
  modified_base 4: mod_base = OTHER; note = 2'O-methyl-adenosine
  modified_base 5: mod_base = gm
  modified_base 6: mod_base = gm
  modified_base 7: mod_base = um
  modified_base 8: mod_base = OTHER; note = 2'O-methyl-adenosine
  modified_base 9: mod_base = OTHER; note = 2'O-methyl-adenosine
  modified_base 10: mod_base = gm
  modified_base 11: mod_base = um
  modified_base 12: mod_base = OTHER; note = 2'O-methyl-adenosine
  modified_base 13: mod_base = um
  modified_base 14: mod_base = gm
  modified_base 15: mod_base = cm
  modified_base 16: mod_base = OTHER; note = locked nucleic acid
  modified_base 17: mod_base = gm
  modified_base 18: mod_base = um
  modified_base 19: mod_base = cm
  modified_base 20: mod_base = OTHER; note = locked nucleic acid
  modified_base 21: mod_base = cm
  modified_base 22: mod_base = cm
  modified_base 23: mod_base = gm
  modified_base 24: mod_base = OTHER; note = locked nucleic acid
  modified_base 25: mod_base = OTHER; note = 2'O-methyl-adenosine
  modified_base 26: mod_base = gm
  modified_base 27: mod_base = gm
  modified_base 28: mod_base = OTHER; note = locked nucleic acid
  modified_base 29: mod_base = cm
  modified_base 30: mod_base = um
  modified_base 31: mod_base = cm
  modified_base 32: mod_base = OTHER; note = locked nucleic acid
  modified_base 33: mod_base = gm
gccaggtaagtatgcagtccccggaggcctcgg

SEQ ID NO: 158 - RNA, 33 nt, synthetic construct
  misc_feature 1..33: note = Description of sequence: bifunctional oligonucleotide
  source 1..33: mol_type = other RNA
  modified_base 1: mod_base = gm
  modified_base 2: mod_base = cm
  modified_base 3: mod_base = cm
  modified_base 4: mod_base = OTHER; note = 2'O-methyl-adenosine
  modified_base 5: mod_base = gm
  modified_base 6: mod_base = gm
  modified_base 7: mod_base = um
  modified_base 8: mod_base = OTHER; note = 2'O-methyl-adenosine
  modified_base 9: mod_base = OTHER; note = 2'O-methyl-adenosine
  modified_base 10: mod_base = gm
  modified_base 11: mod_base = um
  modified_base 12: mod_base = OTHER; note = 2'O-methyl-adenosine
  modified_base 13: mod_base = um
  modified_base 14: mod_base = gm
  modified_base 15: mod_base = gm
  modified_base 16: mod_base = OTHER; note = locked nucleic acid
  modified_base 17: mod_base = OTHER; note = 2'O-methyl-adenosine
  modified_base 18: mod_base = gm
  modified_base 19: mod_base = um
  modified_base 20: mod_base = OTHER; note = locked nucleic acid
  modified_base 21: mod_base = cm
  modified_base 22: mod_base = cm
  modified_base 23: mod_base = cm
  modified_base 24: mod_base = OTHER; note = locked nucleic acid
  modified_base 25: mod_base = gm
  modified_base 26: mod_base = OTHER; note = 2'O-methyl-adenosine
  modified_base 27: mod_base = gm
  modified_base 28: mod_base = OTHER; note = locked nucleic acid
  modified_base 29: mod_base = cm
  modified_base 30: mod_base = cm
  modified_base 31: mod_base = um
  modified_base 32: mod_base = OTHER; note = locked nucleic acid
  modified_base 33: mod_base = gm
gccaggtaagtatggcagtccccggaggcctcg

SEQ ID NO: 159 - DNA, 33 bp, synthetic construct
  misc_feature 1..33: note = Description of sequence: bifunctional oligonucleotide
  source 1..33: mol_type = other DNA
  modified_base 1: mod_base = gm
  modified_base 2: mod_base = cm
  modified_base 3: mod_base = cm
  modified_base 4: mod_base = OTHER; note = 2'O-methyl-adenosine
  modified_base 5: mod_base = gm
  modified_base 6: mod_base = gm
  modified_base 7: mod_base = um
  modified_base 8: mod_base = OTHER; note = 2'O-methyl-adenosine
  modified_base 9: mod_base = OTHER; note = 2'O-methyl-adenosine
  modified_base 10: mod_base = gm
  modified_base 11: mod_base = um
  modified_base 12: mod_base = OTHER; note = 2'O-methyl-adenosine
  modified_base 13: mod_base = um
  modified_base 14: mod_base = cm
  modified_base 15: mod_base = gm
  modified_base 16: mod_base = OTHER; note = locked nucleic acid
  modified_base 17: mod_base = cm
  modified_base 18: mod_base = OTHER; note = 2'O-methyl-adenosine
  modified_base 19: mod_base = gm
  modified_base 20: mod_base = OTHER; note = locked nucleic acid
  modified_base 21: mod_base = cm
  modified_base 22: mod_base = cm
  modified_base 23: mod_base = cm
  modified_base 24: mod_base = OTHER; note = locked nucleic acid
  modified_base 25: mod_base = gm
  modified_base 26: mod_base = gm
  modified_base 27: mod_base = OTHER; note = 2'O-methyl-adenosine
  modified_base 28: mod_base = OTHER; note = locked nucleic acid
  modified_base 29: mod_base = gm
  modified_base 30: mod_base = cm
  modified_base 31: mod_base = cm
  modified_base 32: mod_base = OTHER; note = locked nucleic acid
  modified_base 33: mod_base = cm
  misc_feature 1..19: note = At this position backbone is RNA
  misc_feature 21..31: note = At this position backbone is RNA
  misc_feature 33: note = At this position backbone is RNA
gccaggtaagtatcggcagtccccggaggcctc

SEQ ID NO: 160 - RNA, 33 nt, synthetic construct
  misc_feature 1..33: note = Description of sequence: bifunctional oligonucleotide
  source 1..33: mol_type = other RNA
  modified_base 1: mod_base = gm
  modified_base 2: mod_base = cm
  modified_base 3: mod_base = cm
  modified_base 4: mod_base = OTHER; note = 2'O-methyl-adenosine
  modified_base 5: mod_base = gm
  modified_base 6: mod_base = gm
  modified_base 7: mod_base = um
  modified_base 8: mod_base = OTHER; note = 2'O-methyl-adenosine
  modified_base 9: mod_base = OTHER; note = 2'O-methyl-adenosine
  modified_base 10: mod_base = gm
  modified_base 11: mod_base = um
  modified_base 12: mod_base = OTHER; note = 2'O-methyl-adenosine
  modified_base 13: mod_base = um
  modified_base 14: mod_base = OTHER; note = 2'O-methyl-adenosine
  modified_base 15: mod_base = cm
  modified_base 16: mod_base = OTHER; note = locked nucleic acid
  modified_base 17: mod_base = gm
  modified_base 18: mod_base = cm
  modified_base 19: mod_base = OTHER; note = 2'O-methyl-adenosine
  modified_base 20: mod_base = OTHER; note = locked nucleic acid
  modified_base 21: mod_base = um
  modified_base 22: mod_base = cm
  modified_base 23: mod_base = cm
  modified_base 24: mod_base = OTHER; note = locked nucleic acid
  modified_base 25: mod_base = cm
  modified_base 26: mod_base = gm
  modified_base 27: mod_base = gm
  modified_base 28: mod_base = OTHER; note = locked nucleic acid
  modified_base 29: mod_base = gm
  modified_base 30: mod_base = gm
  modified_base 31: mod_base = cm
  modified_base 32: mod_base = OTHER; note = locked nucleic acid
  modified_base 33: mod_base = um
gccaggtaagtatacggcagtccccggaggcct

SEQ ID NO: 161 - RNA, 33 nt, synthetic construct
  misc_feature 1..33: note = Description of sequence: bifunctional oligonucleotide
  source 1..33: mol_type = other RNA
  modified_base 1: mod_base = gm
  modified_base 2: mod_base = cm
  modified_base 3: mod_base = cm
  modified_base 4: mod_base = OTHER; note = 2'O-methyl-adenosine
  modified_base 5: mod_base = gm
  modified_base 6: mod_base = gm
  modified_base 7: mod_base = um
  modified_base 8: mod_base = OTHER; note = 2'O-methyl-adenosine
  modified_base 9: mod_base = OTHER; note = 2'O-methyl-adenosine
  modified_base 10: mod_base = gm
  modified_base 11: mod_base = um
  modified_base 12: mod_base = OTHER; note = 2'O-methyl-adenosine
  modified_base 13: mod_base = um
  modified_base 14: mod_base = cm
  modified_base 15: mod_base = OTHER; note = 2'O-methyl-adenosine
  modified_base 16: mod_base = OTHER; note = locked nucleic acid
  modified_base 17: mod_base = gm
  modified_base 18: mod_base = gm
  modified_base 19: mod_base = cm
  modified_base 20: mod_base = OTHER; note = locked nucleic acid
  modified_base 21: mod_base = gm
  modified_base 22: mod_base = um
  modified_base 23: mod_base = cm
  modified_base 24: mod_base = OTHER; note = locked nucleic acid
  modified_base 25: mod_base = cm
  modified_base 26: mod_base = cm
  modified_base 27: mod_base = gm
  modified_base 28: mod_base = OTHER; note = locked nucleic acid
  modified_base 29: mod_base = OTHER; note = 2'O-methyl-adenosine
  modified_base 30: mod_base = gm
  modified_base 31: mod_base = gm
  modified_base 32: mod_base = OTHER; note = locked nucleic acid
  modified_base 33: mod_base = cm
gccaggtaagtatcacggcagtccccggaggcc

SEQ ID NO: 162 - RNA, 33 nt, synthetic construct
  misc_feature 1..33: note = Description of sequence: bifunctional oligonucleotide
  source 1..33: mol_type = other RNA
  modified_base 1: mod_base = gm
  modified_base 2: mod_base = cm
  modified_base 3: mod_base = cm
  modified_base 4: mod_base = OTHER; note = 2'O-methyl-adenosine
  modified_base 5: mod_base = gm
  modified_base 6: mod_base = gm
  modified_base 7: mod_base = um
  modified_base 8: mod_base = OTHER; note = 2'O-methyl-adenosine
  modified_base 9: mod_base = OTHER; note = 2'O-methyl-adenosine
  modified_base 10: mod_base = gm
  modified_base 11: mod_base = um
  modified_base 12: mod_base = OTHER; note = 2'O-methyl-adenosine
  modified_base 13: mod_base = um
  modified_base 14: mod_base = gm
  modified_base 15: mod_base = cm
  modified_base 16: mod_base = OTHER; note = locked nucleic acid
  modified_base 17: mod_base = cm
  modified_base 18: mod_base = gm
  modified_base 19: mod_base = gm
  modified_base 20: mod_base = OTHER; note = locked nucleic acid
  modified_base 21: mod_base = OTHER; note = 2'O-methyl-adenosine
  modified_base 22: mod_base = gm
  modified_base 23: mod_base = um
  modified_base 24: mod_base = OTHER; note = locked nucleic acid
  modified_base 25: mod_base = cm
  modified_base 26: mod_base = cm
  modified_base 27: mod_base = cm
  modified_base 28: mod_base = OTHER; note = locked nucleic acid
  modified_base 29: mod_base = gm
  modified_base 30: mod_base = OTHER; note = 2'O-methyl-adenosine
  modified_base 31: mod_base = gm
  modified_base 32: mod_base = OTHER; note = locked nucleic acid
  modified_base 33: mod_base = cm
gccaggtaagtatgcacggcagtccccggaggc

SEQ ID NO: 163 - DNA, 33 bp, synthetic construct
  misc_feature 1..33: note = Description of sequence: bifunctional oligonucleotide
  source 1..33: mol_type = other DNA
  modified_base 1: mod_base = gm
  modified_base 2: mod_base = cm
  modified_base 3: mod_base = cm
  modified_base 4: mod_base = OTHER; note = 2'O-methyl-adenosine
  modified_base 5: mod_base = gm
  modified_base 6: mod_base = gm
  modified_base 7: mod_base = um
  modified_base 8: mod_base = OTHER; note = 2'O-methyl-adenosine
  modified_base 9: mod_base = OTHER; note = 2'O-methyl-adenosine
  modified_base 10: mod_base = gm
  modified_base 11: mod_base = um
  modified_base 12: mod_base = OTHER; note = 2'O-methyl-adenosine
  modified_base 13: mod_base = um
  modified_base 14: mod_base = gm
  modified_base 15: mod_base = gm
  modified_base 16: mod_base = OTHER; note = locked nucleic acid
  modified_base 17: mod_base = OTHER; note = 2'O-methyl-adenosine
  modified_base 18: mod_base = cm
  modified_base 19: mod_base = gm
  modified_base 20: mod_base = OTHER; note = locked nucleic acid
  modified_base 21: mod_base = cm
  modified_base 22: mod_base = OTHER; note = 2'O-methyl-adenosine
  modified_base 23: mod_base = gm
  modified_base 24: mod_base = OTHER; note = locked nucleic acid
  modified_base 25: mod_base = cm
  modified_base 26: mod_base = cm
  modified_base 27: mod_base = cm
  modified_base 28: mod_base = OTHER; note = locked nucleic acid
  modified_base 29: mod_base = gm
  modified_base 30: mod_base = gm
  modified_base 31: mod_base = OTHER; note = 2'O-methyl-adenosine
  modified_base 32: mod_base = OTHER; note = locked nucleic acid
  modified_base 33: mod_base = gm
  misc_feature 1..23: note = At this position backbone is RNA
  misc_feature 25..33: note = At this position backbone is RNA
gccaggtaagtatggcacggcagtccccggagg

SEQ ID NO: 164 - RNA, 33 nt, synthetic construct
  misc_feature 1..33: note = Description of sequence: bifunctional oligonucleotide
  source 1..33: mol_type = other RNA
  modified_base 1: mod_base = gm
  modified_base 2: mod_base = cm
  modified_base 3: mod_base = cm
  modified_base 4: mod_base = OTHER; note = 2'O-methyl-adenosine
  modified_base 5: mod_base = gm
  modified_base 6: mod_base = gm
  modified_base 7: mod_base = um
  modified_base 8: mod_base = OTHER; note = 2'O-methyl-adenosine
  modified_base 9: mod_base = OTHER; note = 2'O-methyl-adenosine
  modified_base 10: mod_base = gm
  modified_base 11: mod_base = um
  modified_base 12: mod_base = OTHER; note = 2'O-methyl-adenosine
  modified_base 13: mod_base = um
  modified_base 14: mod_base = cm
  modified_base 15: mod_base = gm
  modified_base 16: mod_base = OTHER; note = locked nucleic acid
  modified_base 17: mod_base = cm
  modified_base 18: mod_base = OTHER; note = 2'O-methyl-adenosine
  modified_base 19: mod_base = cm
  modified_base 20: mod_base = OTHER; note = locked nucleic acid
  modified_base 21: mod_base = gm
  modified_base 22: mod_base = cm
  modified_base 23: mod_base = OTHER; note = 2'O-methyl-adenosine
  modified_base 24: mod_base = OTHER; note = locked nucleic acid
  modified_base 25: mod_base = um
  modified_base 26: mod_base = cm
  modified_base 27: mod_base = cm
  modified_base 28: mod_base = OTHER; note = locked nucleic acid
  modified_base 29: mod_base = cm
  modified_base 30: mod_base = gm
  modified_base 31: mod_base = gm
  modified_base 32: mod_base = OTHER; note = locked nucleic acid
  modified_base 33: mod_base = gm
gccaggtaagtatcggcacggcagtccccggag

SEQ ID NO: 165 - RNA, 33 nt, synthetic construct
  misc_feature 1..33: note = Description of sequence: bifunctional oligonucleotide
  source 1..33: mol_type = other RNA
  modified_base 1: mod_base = gm
  modified_base 2: mod_base = cm
  modified_base 3: mod_base = cm
  modified_base 4: mod_base = OTHER; note = 2'O-methyl-adenosine
  modified_base 5: mod_base = gm
  modified_base 6: mod_base = gm
  modified_base 7: mod_base = um
  modified_base 8: mod_base = OTHER; note = 2'O-methyl-adenosine
  modified_base 9: mod_base = OTHER; note = 2'O-methyl-adenosine
  modified_base 10: mod_base = gm
  modified_base 11: mod_base = um
  modified_base 12: mod_base = OTHER; note = 2'O-methyl-adenosine
  modified_base 13: mod_base = um
  modified_base 14: mod_base = cm
  modified_base 15: mod_base = cm
  modified_base 16: mod_base = OTHER; note = locked nucleic acid
  modified_base 17: mod_base = gm
  modified_base 18: mod_base = cm
  modified_base 19: mod_base = OTHER; note = 2'O-methyl-adenosine
  modified_base 20: mod_base = OTHER; note = locked nucleic acid
  modified_base 21: mod_base = gm
  modified_base 22: mod_base = gm
  modified_base 23: mod_base = cm
  modified_base 24: mod_base = OTHER; note = locked nucleic acid
  modified_base 25: mod_base = gm
  modified_base 26: mod_base = um
  modified_base 27: mod_base = cm
  modified_base 28: mod_base = OTHER; note = locked nucleic acid
  modified_base 29: mod_base = cm
  modified_base 30: mod_base = cm
  modified_base 31: mod_base = gm
  modified_base 32: mod_base = OTHER; note = locked nucleic acid
  modified_base 33: mod_base = OTHER; note = 2'O-methyl-adenosine
gccaggtaagtatccggcacggcagtccccgga

SEQ ID NO: 166 - DNA, 33 bp, synthetic construct
  misc_feature 1..33: note = Description of sequence: bifunctional oligonucleotide
  source 1..33: mol_type = other DNA
  modified_base 1: mod_base = gm
  modified_base 2: mod_base = cm
  modified_base 3: mod_base = cm
  modified_base 4: mod_base = OTHER; note = 2'O-methyl-adenosine
  modified_base 5: mod_base = gm
  modified_base 6: mod_base = gm
  modified_base 7: mod_base = um
  modified_base 8: mod_base = OTHER; note = 2'O-methyl-adenosine
  modified_base 9: mod_base = OTHER; note = 2'O-methyl-adenosine
  modified_base 10: mod_base = gm
  modified_base 11: mod_base = um
  modified_base 12: mod_base = OTHER; note = 2'O-methyl-adenosine
  modified_base 13: mod_base = um
  modified_base 14: mod_base = um
  modified_base 15: mod_base = cm
  modified_base 16: mod_base = OTHER; note = locked nucleic acid
  modified_base 17: mod_base = cm
  modified_base 18: mod_base = gm
  modified_base 19: mod_base = cm
  modified_base 20: mod_base = OTHER; note = locked nucleic acid
  modified_base 21: mod_base = cm
  modified_base 22: mod_base = gm
  modified_base 23: mod_base = gm
  modified_base 24: mod_base = OTHER; note = locked nucleic acid
  modified_base 25: mod_base = OTHER; note = 2'O-methyl-adenosine
  modified_base 26: mod_base = cm
  modified_base 27: mod_base = gm
  modified_base 28: mod_base = OTHER; note = locked nucleic acid
  modified_base 29: mod_base = cm
  modified_base 30: mod_base = OTHER; note = 2'O-methyl-adenosine
  modified_base 31: mod_base = gm
  modified_base 32: mod_base = OTHER; note = locked nucleic acid
  modified_base 33: mod_base = cm
  misc_feature 1..31: note = At this position backbone is RNA
  misc_feature 33: note = At this position backbone is RNA
gccaggtaagtattcccgcccggcacggcagtc

SEQ ID NO: 167 - RNA, 33 nt, synthetic construct
  misc_feature 1..33: note = Description of sequence: bifunctional oligonucleotide
  source 1..33: mol_type = other RNA
  modified_base 1: mod_base = gm
  modified_base 2: mod_base = cm
  modified_base 3: mod_base = cm
  modified_base 4: mod_base = OTHER; note = 2'O-methyl-adenosine
  modified_base 5: mod_base = gm
  modified_base 6: mod_base = gm
  modified_base 7: mod_base = um
  modified_base 8: mod_base = OTHER; note = 2'O-methyl-adenosine
  modified_base 9: mod_base = OTHER; note = 2'O-methyl-adenosine
  modified_base 10: mod_base = gm
  modified_base 11: mod_base = um
  modified_base 12: mod_base = OTHER; note = 2'O-methyl-adenosine
  modified_base 13: mod_base = um
  modified_base 14: mod_base = cm
  modified_base 15: mod_base = um
  modified_base 16: mod_base = OTHER; note = locked nucleic acid
  modified_base 17: mod_base = cm
  modified_base 18: mod_base = cm
  modified_base 19: mod_base = gm
  modified_base 20: mod_base = OTHER; note = locked nucleic acid
  modified_base 21: mod_base = cm
  modified_base 22: mod_base = cm
  modified_base 23: mod_base = gm
  modified_base 24: mod_base = OTHER; note = locked nucleic acid
  modified_base 25: mod_base = cm
  modified_base 26: mod_base = OTHER; note = 2'O-methyl-adenosine
  modified_base 27: mod_base = cm
  modified_base 28: mod_base = OTHER; note = locked nucleic acid
  modified_base 29: mod_base = gm
  modified_base 30: mod_base = cm
  modified_base 31: mod_base = OTHER; note = 2'O-methyl-adenosine
  modified_base 32: mod_base = OTHER; note = locked nucleic acid
  modified_base 33: mod_base = um
gccaggtaagtatctcccgcccggcacggcagt

SEQ ID NO: 168 - DNA, 33 bp, synthetic construct
  misc_feature 1..33: note = Description of sequence: bifunctional oligonucleotide
  source 1..33: mol_type = other DNA
  modified_base 1: mod_base = gm
  modified_base 2: mod_base = cm
  modified_base 3: mod_base = cm
  modified_base 4: mod_base = OTHER; note = 2'O-methyl-adenosine
  modified_base 5: mod_base = gm
  modified_base 6: mod_base = gm
  modified_base 7: mod_base = um
  modified_base 8: mod_base = OTHER; note = 2'O-methyl-adenosine
  modified_base 9: mod_base = OTHER; note = 2'O-methyl-adenosine
  modified_base 10: mod_base = gm
  modified_base 11: mod_base = um
  modified_base 12: mod_base = OTHER; note = 2'O-methyl-adenosine
  modified_base 13: mod_base = um
  modified_base 14: mod_base = um
  modified_base 15: mod_base = cm
  modified_base 16: mod_base = OTHER; note = locked nucleic acid
  modified_base 17: mod_base = cm
  modified_base 18: mod_base = cm
  modified_base 19: mod_base = cm
  modified_base 20: mod_base = OTHER; note = locked nucleic acid
  modified_base 21: mod_base = cm
  modified_base 22: mod_base = cm
  modified_base 23: mod_base = cm
  modified_base 24: mod_base = OTHER; note = locked nucleic acid
  modified_base 25: mod_base = gm
  modified_base 26: mod_base = cm
  modified_base 27: mod_base = OTHER; note = 2'O-methyl-adenosine
  modified_base 28: mod_base = OTHER; note = locked nucleic acid
  modified_base 29: mod_base = gm
  modified_base 30: mod_base = gm
  modified_base 31: mod_base = cm
  modified_base 32: mod_base = OTHER; note = locked nucleic acid
  modified_base 33: mod_base = gm
  misc_feature 1..15: note = At this position backbone is RNA
  misc_feature 17..33: note = At this position backbone is RNA
gccaggtaagtattctcccgcccggcacggcag

SEQ ID NO: 169 - RNA, 33 nt, synthetic construct
  misc_feature 1..33: note = Description of sequence: bifunctional oligonucleotide
  source 1..33: mol_type = other RNA
  modified_base 1: mod_base = gm
  modified_base 2: mod_base = cm
  modified_base 3: mod_base = cm
  modified_base 4: mod_base = OTHER; note = 2'O-methyl-adenosine
  modified_base 5: mod_base = gm
  modified_base 6: mod_base = gm
  modified_base 7: mod_base = um
  modified_base 8: mod_base = OTHER; note = 2'O-methyl-adenosine
  modified_base 9: mod_base = OTHER; note = 2'O-methyl-adenosine
  modified_base 10: mod_base = gm
  modified_base 11: mod_base = um
  modified_base 12: mod_base = OTHER; note = 2'O-methyl-adenosine
  modified_base 13: mod_base = um
  modified_base 14: mod_base = gm
  modified_base 15: mod_base = um
  modified_base 16: mod_base = OTHER; note = locked nucleic acid
  modified_base 17: mod_base = um
  modified_base 18: mod_base = cm
  modified_base 19: mod_base = cm
  modified_base 20: mod_base = OTHER; note = locked nucleic acid
  modified_base 21: mod_base = gm
  modified_base 22: mod_base = cm
  modified_base 23: mod_base = cm
  modified_base 24: mod_base = OTHER; note = locked nucleic acid
  modified_base 25: mod_base = gm
  modified_base 26: mod_base = gm
  modified_base 27: mod_base = cm
  modified_base 28: mod_base = OTHER; note = locked nucleic acid
  modified_base 29: mod_base = cm
  modified_base 30: mod_base = gm
  modified_base 31: mod_base = gm
  modified_base 32: mod_base = OTHER; note = locked nucleic acid
  modified_base 33: mod_base = OTHER; note = 2'O-methyl-adenosine
gccaggtaagtatgtctcccgcccggcacggca

SEQ ID NO: 170 - DNA, 33 bp, synthetic construct
  misc_feature 1..33: note = Description of sequence: bifunctional oligonucleotide
  source 1..33: mol_type = other DNA
  modified_base 1: mod_base = gm
  modified_base 2: mod_base = cm
  modified_base 3: mod_base = cm
  modified_base 4: mod_base = OTHER; note = 2'O-methyl-adenosine
  modified_base 5: mod_base = gm
  modified_base 6: mod_base = gm
  modified_base 7: mod_base = um
  modified_base 8: mod_base = OTHER; note = 2'O-methyl-adenosine
  modified_base 9: mod_base = OTHER; note = 2'O-methyl-adenosine
  modified_base 10: mod_base = gm
  modified_base 11: mod_base = um
  modified_base 12: mod_base = OTHER; note = 2'O-methyl-adenosine
  modified_base 13: mod_base = um
  modified_base 14: mod_base = um
  modified_base 15: mod_base = gm
  modified_base 16: mod_base = OTHER; note = locked nucleic acid
  modified_base 17: mod_base = cm
  modified_base 18: mod_base = gm
  modified_base 19: mod_base = gm
  modified_base 20: mod_base = OTHER; note = locked nucleic acid
  modified_base 21: mod_base = cm
  modified_base 22: mod_base = um
  modified_base 23: mod_base = cm
  modified_base 24: mod_base = OTHER; note = locked nucleic acid
  modified_base 25: mod_base = cm
  modified_base 26: mod_base = gm
  modified_base 27: mod_base = cm
  modified_base 28: mod_base = OTHER; note = locked nucleic acid
  modified_base 29: mod_base = cm
  modified_base 30: mod_base = gm
  modified_base 31: mod_base = gm
  modified_base 32: mod_base = OTHER; note = locked nucleic acid
  modified_base 33: mod_base = OTHER; note = 2'O-methyl-adenosine
  misc_feature 1..19: note = At this position backbone is RNA
  misc_feature 21..33: note = At this position backbone is RNA
gccaggtaagtattggcggtctcccgcccggca

SEQ ID NO: 171 - RNA, 33 nt, synthetic construct
  misc_feature 1..33: note = Description of sequence: bifunctional oligonucleotide
  source 1..33: mol_type = other RNA
  modified_base 1: mod_base = gm
  modified_base 2: mod_base = cm
  modified_base 3: mod_base = cm
  modified_base 4: mod_base = OTHER; note = 2'O-methyl-adenosine
  modified_base 5: mod_base = gm
  modified_base 6: mod_base = gm
  modified_base 7: mod_base = um
  modified_base 8: mod_base = OTHER; note = 2'O-methyl-adenosine
  modified_base 9: mod_base = OTHER; note = 2'O-methyl-adenosine
  modified_base 10: mod_base = gm
  modified_base 11: mod_base = um
  modified_base 12: mod_base = OTHER; note = 2'O-methyl-adenosine
  modified_base 13: mod_base = um
  modified_base 14: mod_base = OTHER; note = 2'O-methyl-adenosine
  modified_base 15: mod_base = um
  modified_base 16: mod_base = OTHER; note = locked nucleic acid
  modified_base 17: mod_base = gm
  modified_base 18: mod_base = cm
  modified_base 19: mod_base = gm
  modified_base 20: mod_base = OTHER; note = locked nucleic acid
  modified_base 21: mod_base = um
  modified_base 22: mod_base = cm
  modified_base 23: mod_base = um
  modified_base 24: mod_base = OTHER; note = locked nucleic acid
  modified_base 25: mod_base = cm
  modified_base 26: mod_base = cm
  modified_base 27: mod_base = gm
  modified_base 28: mod_base = OTHER; note = locked nucleic acid
  modified_base 29: mod_base = cm
  modified_base 30: mod_base = cm
  modified_base 31: mod_base = gm
  modified_base 32: mod_base = OTHER; note = locked nucleic acid
  modified_base 33: mod_base = cm
gccaggtaagtatatggcggtctcccgcccggc

SEQ ID NO: 172 - DNA, 33 bp, synthetic construct
  misc_feature 1..33: note = Description of sequence: bifunctional oligonucleotide
  source 1..33: mol_type = other DNA
  modified_base 1: mod_base = gm
  modified_base 2: mod_base = cm
  modified_base 3: mod_base = cm
  modified_base 4: mod_base = OTHER; note = 2'O-methyl-adenosine
  modified_base 5: mod_base = gm
  modified_base 6: mod_base = gm
  modified_base 7: mod_base = um
  modified_base 8: mod_base = OTHER; note = 2'O-methyl-adenosine
  modified_base 9: mod_base = OTHER; note = 2'O-methyl-adenosine
  modified_base 10: mod_base = gm
  modified_base 11: mod_base = um
  modified_base 12: mod_base = OTHER; note = 2'O-methyl-adenosine
  modified_base 13: mod_base = um
  modified_base 14: mod_base = cm
  modified_base 15: mod_base = OTHER; note = 2'O-methyl-adenosine
  modified_base 16: mod_base = OTHER; note = locked nucleic acid
  modified_base 17: mod_base = gm
  modified_base 18: mod_base = gm
  modified_base 19: mod_base = cm
  modified_base 20: mod_base = OTHER; note = locked nucleic acid
  modified_base 21: mod_base = gm
  modified_base 22: mod_base = um
  modified_base 23: mod_base = cm
  modified_base 24: mod_base = OTHER; note = locked nucleic acid
  modified_base 25: mod_base = cm
  modified_base 26: mod_base = cm
  modified_base 27: mod_base = cm
  modified_base 28: mod_base = OTHER; note = locked nucleic acid
  modified_base 29: mod_base = cm
  modified_base 30: mod_base = cm
  modified_base 31: mod_base = cm
  modified_base 32: mod_base = OTHER; note = locked nucleic acid
  modified_base 33: mod_base = gm
  misc_feature 1..15: note = At this position backbone is RNA
  misc_feature 17..23: note = At this position backbone is RNA
  misc_feature 25..33: note = At this position backbone is RNA
gccaggtaagtatcatggcggtctcccgcccgg

SEQ ID NO: 173 - RNA, 33 nt, synthetic construct
  misc_feature 1..33: note = Description of sequence: bifunctional oligonucleotide
  source 1..33: mol_type = other RNA
  modified_base 1: mod_base = gm
  modified_base 2: mod_base = cm
  modified_base 3: mod_base = cm
  modified_base 4: mod_base = OTHER; note = 2'O-methyl-adenosine
  modified_base 5: mod_base = gm
  modified_base 6: mod_base = gm
  modified_base 7: mod_base = um
  modified_base 8: mod_base = OTHER; note = 2'O-methyl-adenosine
  modified_base 9: mod_base = OTHER; note = 2'O-methyl-adenosine
  modified_base 10: mod_base = gm
  modified_base 11: mod_base = um
  modified_base 12: mod_base = OTHER; note = 2'O-methyl-adenosine
  modified_base 13: mod_base = um
  modified_base 14: mod_base = cm
  modified_base 15: mod_base = cm
  modified_base 16: mod_base = OTHER; note = locked nucleic acid
  modified_base 17: mod_base = um
  modified_base 18: mod_base = gm
  modified_base 19: mod_base = gm
  modified_base 20: mod_base = OTHER; note = locked nucleic acid
  modified_base 21: mod_base = gm
  modified_base 22: mod_base = gm
  modified_base 23: mod_base = um
  modified_base 24: mod_base = OTHER; note = locked nucleic acid
  modified_base 25: mod_base = um
  modified_base 26: mod_base = cm
  modified_base 27: mod_base = cm
  modified_base 28: mod_base = OTHER; note = locked nucleic acid
  modified_base 29: mod_base = gm
  modified_base 30: mod_base = cm
  modified_base 31: mod_base = cm
  modified_base 32: mod_base = OTHER; note = locked nucleic acid
  modified_base 33: mod_base = gm
gccaggtaagtatccatggcggtctcccgcccg

SEQ ID NO: 174 - DNA, 33 bp, synthetic construct
  misc_feature 1..33: note = Description of sequence: bifunctional oligonucleotide
  source 1..33: mol_type = other DNA
  modified_base 1: mod_base = gm
  modified_base 2: mod_base = cm
  modified_base 3: mod_base = cm
  modified_base 4: mod_base = OTHER; note = 2'O-methyl-adenosine
  modified_base 5: mod_base = gm
  modified_base 6: mod_base = gm
  modified_base 7: mod_base = um
  modified_base 8: mod_base = OTHER; note = 2'O-methyl-adenosine
  modified_base 9: mod_base = OTHER; note = 2'O-methyl-adenosine
  modified_base 10: mod_base = gm
  modified_base 11: mod_base = um
  modified_base 12: mod_base = OTHER; note = 2'O-methyl-adenosine
  modified_base 13: mod_base = um
  modified_base 14: mod_base = gm
  modified_base 15: mod_base = cm
  modified_base 16: mod_base = OTHER; note = locked nucleic acid
  modified_base 17: mod_base = OTHER; note = 2'O-methyl-adenosine
  modified_base 18: mod_base = um
  modified_base 19: mod_base = gm
  modified_base 20: mod_base = OTHER; note = locked nucleic acid
  modified_base 21: mod_base = cm
  modified_base 22: mod_base = gm
  modified_base 23: mod_base = gm
  modified_base 24: mod_base = OTHER; note = locked nucleic acid
  modified_base 25: mod_base = cm
  modified_base 26: mod_base = um
  modified_base 27: mod_base = cm
  modified_base 28: mod_base = OTHER; note = locked nucleic acid
  modified_base 29: mod_base = cm
  modified_base 30: mod_base = gm
  modified_base 31: mod_base = cm
  modified_base 32: mod_base = OTHER; note = locked nucleic acid
  modified_base 33: mod_base = cm
  misc_feature 1..23: note = At this position backbone is RNA
  misc_feature 25..33: note = At this position backbone is RNA
gccaggtaagtatgccatggcggtctcccgccc

SEQ ID NO: 175 - RNA, 33 nt, synthetic construct
  misc_feature 1..33: note = Description of sequence: bifunctional oligonucleotide
  source 1..33: mol_type = other RNA
  modified_base 1: mod_base = gm
  modified_base 2: mod_base = cm
  modified_base 3: mod_base = cm
  modified_base 4: mod_base = OTHER; note = 2'O-methyl-adenosine
  modified_base 5: mod_base = gm
  modified_base 6: mod_base = gm
  modified_base 7: mod_base = um
  modified_base 8: mod_base = OTHER; note = 2'O-methyl-adenosine
  modified_base 9: mod_base = OTHER; note = 2'O-methyl-adenosine
  modified_base 10: mod_base = gm
  modified_base 11: mod_base = um
  modified_base 12: mod_base = OTHER; note = 2'O-methyl-adenosine
  modified_base 13: mod_base = um
  modified_base 14: mod_base = cm
  modified_base 15: mod_base = gm
  modified_base 16: mod_base = OTHER; note = locked nucleic acid
  modified_base 17: mod_base = cm
  modified_base 18: mod_base = OTHER; note = 2'O-methyl-adenosine
  modified_base 19: mod_base = um
  modified_base 20: mod_base = OTHER; note = locked nucleic acid
  modified_base 21: mod_base = gm
  modified_base 22: mod_base = cm
  modified_base 23: mod_base = gm
  modified_base 24: mod_base = OTHER; note = locked nucleic acid
  modified_base 25: mod_base = um
  modified_base 26: mod_base = cm
  modified_base 27: mod_base = um
  modified_base 28: mod_base = OTHER; note = locked nucleic acid
  modified_base 29: mod_base = cm
  modified_base 30: mod_base = cm
  modified_base 31: mod_base = gm
  modified_base 32: mod_base = OTHER; note = locked nucleic acid
  modified_base 33: mod_base = cm
gccaggtaagtatcgccatggcggtctcccgcc

SEQ ID NO: 176 - DNA, 33 bp, synthetic construct
  misc_feature 1..33: note = Description of sequence: bifunctional oligonucleotide
  source 1..33: mol_type = other DNA
  modified_base 1: mod_base = gm
  modified_base 2: mod_base = cm
  modified_base 3: mod_base = cm
  modified_base 4: mod_base = OTHER; note = 2'O-methyl-adenosine
  modified_base 5: mod_base = gm
  modified_base 6: mod_base = gm
  modified_base 7: mod_base = um
  modified_base 8: mod_base = OTHER; note = 2'O-methyl-adenosine
  modified_base 9: mod_base = OTHER; note = 2'O-methyl-adenosine
  modified_base 10: mod_base = gm
  modified_base 11: mod_base = um
  modified_base 12: mod_base = OTHER; note = 2'O-methyl-adenosine
  modified_base 13: mod_base = um
  modified_base 14: mod_base = um
  modified_base 15: mod_base = cm
  modified_base 16: mod_base = OTHER; note = locked nucleic acid
  modified_base 17: mod_base = cm
  modified_base 18: mod_base = cm
  modified_base 19: mod_base = OTHER; note = 2'O-methyl-adenosine
  modified_base 20: mod_base = OTHER; note = locked nucleic acid
  modified_base 21: mod_base = gm
  modified_base 22: mod_base = gm
  modified_base 23: mod_base = cm
  modified_base 24: mod_base = OTHER; note = locked nucleic acid
  modified_base 25: mod_base = gm
  modified_base 26: mod_base = um
  modified_base 27: mod_base = cm
  modified_base 28: mod_base = OTHER; note = locked nucleic acid
  modified_base 29: mod_base = cm
  modified_base 30: mod_base = cm
  modified_base 31: mod_base = cm
  modified_base 32: mod_base = OTHER; note = locked nucleic acid
  modified_base 33: mod_base = cm
  misc_feature 1..19: note = At this position backbone is RNA
  misc_feature 21..27: note = At this position backbone is RNA
  misc_feature 29..33: note = At this position backbone is RNA
gccaggtaagtattcgccatggcggtctcccgc

SEQ ID NO: 177 - RNA, 33 nt, synthetic construct
  misc_feature 1..33: note = Description of sequence: bifunctional oligonucleotide
  source 1..33: mol_type = other RNA
  modified_base 1: mod_base = gm
  modified_base 2: mod_base = cm
  modified_base 3: mod_base = cm
  modified_base 4: mod_base = OTHER; note = 2'O-methyl-adenosine
  modified_base 5: mod_base = gm
  modified_base 6: mod_base = gm
  modified_base 7: mod_base = um
  modified_base 8: mod_base = OTHER; note = 2'O-methyl-adenosine
  modified_base 9: mod_base = OTHER; note = 2'O-methyl-adenosine
  modified_base 10: mod_base = gm
  modified_base 11: mod_base = um
  modified_base 12: mod_base = OTHER; note = 2'O-methyl-adenosine
  modified_base 13: mod_base = um
  modified_base 14: mod_base = gm
  modified_base 15: mod_base = um
  modified_base 16: mod_base = OTHER; note = locked nucleic acid
  modified_base 17: mod_base = gm
  modified_base 18: mod_base = cm
  modified_base 19: mod_base = cm
  modified_base 20: mod_base = OTHER; note = locked nucleic acid
  modified_base 21: mod_base = um
  modified_base 22: mod_base = gm
  modified_base 23: mod_base = gm
  modified_base 24: mod_base = OTHER; note = locked nucleic acid
  modified_base 25: mod_base = gm
  modified_base 26: mod_base = gm
  modified_base 27: mod_base = um
  modified_base 28: mod_base = OTHER; note = locked nucleic acid
  modified_base 29: mod_base = um
  modified_base 30: mod_base = cm
  modified_base 31: mod_base = cm
  modified_base 32: mod_base = OTHER; note = locked nucleic acid
  modified_base 33: mod_base = gm
gccaggtaagtatgtcgccatggcggtctcccg

SEQ ID NO: 178 - DNA, 33 bp, synthetic construct
  misc_feature 1..33: note = Description of sequence: bifunctional oligonucleotide
  source 1..33: mol_type = other DNA
  modified_base 1: mod_base = gm
  modified_base 2: mod_base = cm
  modified_base 3: mod_base = cm
  modified_base 4: mod_base = OTHER; note = 2'O-methyl-adenosine
  modified_base 5: mod_base = gm
  modified_base 6: mod_base = gm
  modified_base 7: mod_base = um
  modified_base 8: mod_base = OTHER; note = 2'O-methyl-adenosine
  modified_base 9: mod_base = OTHER; note = 2'O-methyl-adenosine
  modified_base 10: mod_base = gm
  modified_base 11: mod_base = um
  modified_base 12: mod_base = OTHER; note = 2'O-methyl-adenosine
  modified_base 13: mod_base = um
  modified_base 14: mod_base = gm
  modified_base 15: mod_base = gm
  modified_base 16: mod_base = OTHER; note = locked nucleic acid
  modified_base 17: mod_base = cm
  modified_base 18: mod_base = gm
  modified_base 19: mod_base = cm
  modified_base 20: mod_base = OTHER; note = locked nucleic acid
  modified_base 21: mod_base = OTHER; note = 2'O-methyl-adenosine
  modified_base 22: mod_base = um
  modified_base 23: mod_base = gm
  modified_base 24: mod_base = OTHER; note = locked nucleic acid
  modified_base 25: mod_base = cm
  modified_base 26: mod_base = gm
  modified_base 27: mod_base = gm
  modified_base 28: mod_base = OTHER; note = locked nucleic acid
  modified_base 29: mod_base = cm
  modified_base 30: mod_base = um
  modified_base 31: mod_base = cm
  modified_base 32: mod_base = OTHER; note = locked nucleic acid
  modified_base 33: mod_base = cm
  misc_feature 1..15: note = At this position backbone is RNA
  misc_feature 17..27: note = At this position backbone is RNA
  misc_feature 29..33: note = At this position backbone is RNA
gccaggtaagtatggtcgccatggcggtctccc

SEQ ID NO: 179 - RNA, 33 nt, synthetic construct
  misc_feature 1..33: note = Description of sequence: bifunctional oligonucleotide
  source 1..33: mol_type = other RNA
  modified_base 1: mod_base = gm
  modified_base 2: mod_base = cm
  modified_base 3: mod_base = cm
  modified_base 4: mod_base = OTHER; note = 2'O-methyl-adenosine
  modified_base 5: mod_base = gm
  modified_base 6: mod_base = gm
  modified_base 7: mod_base = um
  modified_base 8: mod_base = OTHER; note = 2'O-methyl-adenosine
  modified_base 9: mod_base = OTHER; note = 2'O-methyl-adenosine
  modified_base 10: mod_base = gm
  modified_base 11: mod_base = um
  modified_base 12: mod_base = OTHER; note = 2'O-methyl-adenosine
  modified_base 13: mod_base = um
  modified_base 14: mod_base = gm
  modified_base 15: mod_base = gm
  modified_base 16: mod_base = OTHER; note = locked nucleic acid
  modified_base 17: mod_base = um
  modified_base 18: mod_base = cm
  modified_base 19: mod_base = gm
  modified_base 20: mod_base = OTHER; note = locked nucleic acid
  modified_base 21: mod_base = cm
  modified_base 22: mod_base = OTHER; note = 2'O-methyl-adenosine
  modified_base 23: mod_base = um
  modified_base 24: mod_base = OTHER; note = locked nucleic acid
  modified_base 25: mod_base = gm
  modified_base 26: mod_base = cm
  modified_base 27: mod_base = gm
  modified_base 28: mod_base = OTHER; note = locked nucleic acid
  modified_base 29: mod_base = um
  modified_base 30: mod_base = cm
  modified_base 31: mod_base = um
  modified_base 32: mod_base = OTHER; note = locked nucleic acid
  modified_base 33: mod_base = cm
gccaggtaagtatgggtcgccatggcggtctcc

SEQ ID NO: 180 - DNA, 33 bp, synthetic construct
  misc_feature 1..33: note = Description of sequence: bifunctional oligonucleotide
  source 1..33: mol_type = other DNA
  modified_base 1: mod_base = gm
  modified_base 2: mod_base = cm
  modified_base 3: mod_base = cm
  modified_base 4: mod_base = OTHER; note = 2'O-methyl-adenosine
  modified_base 5: mod_base = gm
  modified_base 6: mod_base = gm
  modified_base 7: mod_base = um
  modified_base 8: mod_base = OTHER; note = 2'O-methyl-adenosine
  modified_base 9: mod_base = OTHER; note = 2'O-methyl-adenosine
  modified_base 10: mod_base = gm
  modified_base 11: mod_base = um
  modified_base 12: mod_base = OTHER; note = 2'O-methyl-adenosine
  modified_base 13: mod_base = um
  modified_base 14: mod_base = OTHER; note = 2'O-methyl-adenosine
  modified_base 15: mod_base = gm
  modified_base 16: mod_base = OTHER; note = locked nucleic acid
  modified_base 17: mod_base = gm
  modified_base 18: mod_base = um
  modified_base 19: mod_base = cm
  modified_base 20: mod_base = OTHER; note = locked nucleic acid
  modified_base 21: mod_base = cm
  modified_base 22: mod_base = cm
  modified_base 23: mod_base = OTHER; note = 2'O-methyl-adenosine
  modified_base 24: mod_base = OTHER; note = locked nucleic acid
  modified_base 25: mod_base = gm
  modified_base 26: mod_base = gm
  modified_base 27: mod_base = cm
  modified_base 28: mod_base = OTHER; note = locked nucleic acid
  modified_base 29: mod_base = gm
  modified_base 30: mod_base = um
  modified_base 31: mod_base = cm
  modified_base 32: mod_base = OTHER; note = locked nucleic acid
  modified_base 33: mod_base = cm
  misc_feature 1..23: note = At this position backbone is RNA
  misc_feature 25..31: note = At this position backbone is RNA
  misc_feature 33: note = At this position backbone is RNA
gccaggtaagtatagggtcgccatggcggtctc

SEQ ID NO: 181 - RNA, 33 nt, synthetic construct
  misc_feature 1..33: note = Description of sequence: bifunctional oligonucleotide
  source 1..33: mol_type = other RNA
  modified_base 1: mod_base = gm
  modified_base 2: mod_base = cm
  modified_base 3: mod_base = cm
  modified_base 4: mod_base = OTHER; note = 2'O-methyl-adenosine
  modified_base 5: mod_base = gm
  modified_base 6: mod_base = gm
  modified_base 7: mod_base = um
  modified_base 8: mod_base = OTHER; note = 2'O-methyl-adenosine
  modified_base 9: mod_base = OTHER; note = 2'O-methyl-adenosine
  modified_base 10: mod_base = gm
  modified_base 11: mod_base = um
  modified_base 12: mod_base = OTHER; note = 2'O-methyl-adenosine
  modified_base 13: mod_base = um
  modified_base 14: mod_base = cm
  modified_base 15: mod_base = OTHER; note = 2'O-methyl-adenosine
  modified_base 16: mod_base = OTHER; note = locked nucleic acid
  modified_base 17: mod_base = gm
  modified_base 18: mod_base = gm
  modified_base 19: mod_base = um
  modified_base 20: mod_base = OTHER; note = locked nucleic acid
  modified_base 21: mod_base = gm
  modified_base 22: mod_base = cm
  modified_base 23: mod_base = cm
  modified_base 24: mod_base = OTHER; note = locked nucleic acid
  modified_base 25: mod_base = um
  modified_base 26: mod_base = gm
  modified_base 27: mod_base = gm
  modified_base 28: mod_base = OTHER; note = locked nucleic acid
  modified_base 29: mod_base = gm
  modified_base 30: mod_base = gm
  modified_base 31: mod_base = um
  modified_base 32: mod_base = OTHER; note = locked nucleic acid
  modified_base 33: mod_base = um
gccaggtaagtatcagggtcgccatggcggtct

SEQ ID NO: 182 - DNA, 33 bp, synthetic construct
  misc_feature 1..33: note = Description of sequence: bifunctional oligonucleotide
  source 1..33: mol_type = other DNA
  modified_base 1: mod_base = gm
  modified_base 2: mod_base = cm
  modified_base 3: mod_base = cm
  modified_base 4: mod_base = OTHER; note = 2'O-methyl-adenosine
  modified_base 5: mod_base = gm
  modified_base 6: mod_base = gm
  modified_base 7: mod_base = um
  modified_base 8: mod_base = OTHER; note = 2'O-methyl-adenosine
  modified_base 9: mod_base = OTHER; note = 2'O-methyl-adenosine
  modified_base 10: mod_base = gm
  modified_base 11: mod_base = um
  modified_base 12: mod_base = OTHER; note = 2'O-methyl-adenosine
  modified_base 13: mod_base = um
  modified_base 14: mod_base = cm
  modified_base 15: mod_base = cm
  modified_base 16: mod_base = OTHER; note = locked nucleic acid
  modified_base 17: mod_base = gm
  modified_base 18: mod_base = gm
  modified_base 19: mod_base = gm
  modified_base 20: mod_base = OTHER; note = locked nucleic acid
  modified_base 21: mod_base = cm
  modified_base 22: mod_base = gm
  modified_base 23: mod_base = cm
  modified_base 24: mod_base = OTHER; note = locked nucleic acid
  modified_base 25: mod_base = OTHER; note = 2'O-methyl-adenosine
  modified_base 26: mod_base = um
  modified_base 27: mod_base = gm
  modified_base 28: mod_base = OTHER; note = locked nucleic acid
  modified_base 29: mod_base = cm
  modified_base 30: mod_base = gm
  modified_base 31: mod_base = gm
  modified_base 32: mod_base = OTHER; note = locked nucleic acid
  modified_base 33: mod_base = cm
  misc_feature 1..19: note = At this position backbone is RNA
  misc_feature 21..31: note = At this position backbone is RNA
  misc_feature 33: note = At this position backbone is RNA
gccaggtaagtatccagggtcgccatggcggtc

SEQ ID NO: 183 - RNA, 33 nt, synthetic construct
  misc_feature 1..33: note = Description of sequence: bifunctional oligonucleotide
  source 1..33: mol_type = other RNA
  modified_base 1: mod_base = gm
  modified_base 2: mod_base = cm
  modified_base 3: mod_base = cm
  modified_base 4: mod_base = OTHER; note = 2'O-methyl-adenosine
  modified_base 5: mod_base = gm
  modified_base 6: mod_base = gm
  modified_base 7: mod_base = um
  modified_base 8: mod_base = OTHER; note = 2'O-methyl-adenosine
  modified_base 9: mod_base = OTHER; note = 2'O-methyl-adenosine
  modified_base 10: mod_base = gm
  modified_base 11: mod_base = um
  modified_base 12: mod_base = OTHER; note = 2'O-methyl-adenosine
  modified_base 13: mod_base = um
  modified_base 14: mod_base = um
  modified_base 15: mod_base = cm
  modified_base 16: mod_base = OTHER; note = locked nucleic acid
  modified_base 17: mod_base = OTHER; note = 2'O-methyl-adenosine
  modified_base 18: mod_base = gm
  modified_base 19: mod_base = gm
  modified_base 20: mod_base = OTHER; note = locked nucleic acid
  modified_base 21: mod_base = um
  modified_base 22: mod_base = cm
  modified_base 23: mod_base = gm
  modified_base 24: mod_base = OTHER; note = locked nucleic acid
  modified_base 25: mod_base = cm
  modified_base 26: mod_base = OTHER; note = 2'O-methyl-adenosine
  modified_base 27: mod_base = um
  modified_base 28: mod_base = OTHER; note = locked nucleic acid
  modified_base 29: mod_base = gm
  modified_base 30: mod_base = cm
  modified_base 31: mod_base = gm
  modified_base 32: mod_base = OTHER; note = locked nucleic acid
  modified_base 33: mod_base = um
gccaggtaagtattccagggtcgccatggcggt

SEQ ID NO: 184 - DNA, 33 bp, synthetic construct
  misc_feature 1..33: note = Description of sequence: bifunctional oligonucleotide
  source 1..33: mol_type = other DNA
  modified_base 1: mod_base = gm
  modified_base 2: mod_base = cm
  modified_base 3: mod_base = cm
  modified_base 4: mod_base = OTHER; note = 2'O-methyl-adenosine
  modified_base 5: mod_base = gm
  modified_base 6: mod_base = gm
  modified_base 7: mod_base = um
  modified_base 8: mod_base = OTHER; note = 2'O-methyl-adenosine
  modified_base 9: mod_base = OTHER; note = 2'O-methyl-adenosine
  modified_base 10: mod_base = gm
  modified_base 11: mod_base = um
  modified_base 12: mod_base = OTHER; note = 2'O-methyl-adenosine
  modified_base 13: mod_base = um
  modified_base 14: mod_base = um
  modified_base 15: mod_base = um
  modified_base 16: mod_base = OTHER; note = locked nucleic acid
  modified_base 17: mod_base = cm
  modified_base 18: mod_base = OTHER; note = 2'O-methyl-adenosine
  modified_base 19: mod_base = gm
  modified_base 20: mod_base = OTHER; note = locked nucleic acid
  modified_base 21: mod_base = gm
  modified_base 22: mod_base = um
  modified_base 23: mod_base = cm
  modified_base 24: mod_base = OTHER; note = locked nucleic acid
  modified_base 25: mod_base = cm
  modified_base 26: mod_base = cm
  modified_base 27: mod_base = OTHER; note = 2'O-methyl-adenosine
  modified_base 28: mod_base = OTHER; note = locked nucleic acid
  modified_base 29: mod_base = gm
  modified_base 30: mod_base = gm
  modified_base 31: mod_base = cm
  modified_base 32: mod_base = OTHER; note = locked nucleic acid
  modified_base 33: mod_base = gm
  misc_feature 1..27: note = At this position backbone is RNA
  misc_feature 29..33: note = At this position backbone is RNA
gccaggtaagtatttccagggtcgccatggcgg

SEQ ID NO: 185 - DNA, 33 bp, synthetic construct
  misc_feature 1..33: note = Description of sequence: bifunctional oligonucleotide
  source 1..33: mol_type = other DNA
  modified_base 1: mod_base = gm
  modified_base 2: mod_base = cm
  modified_base 3: mod_base = cm
  modified_base 4: mod_base = OTHER; note = 2'O-methyl-adenosine
  modified_base 5: mod_base = gm
  modified_base 6: mod_base = gm
  modified_base 7: mod_base = um
  modified_base 8: mod_base = OTHER; note = 2'O-methyl-adenosine
  modified_base 9: mod_base = OTHER; note = 2'O-methyl-adenosine
  modified_base 10: mod_base = gm
  modified_base 11: mod_base = um
  modified_base 12: mod_base = OTHER; note = 2'O-methyl-adenosine
  modified_base 13: mod_base = um
  modified_base 14: mod_base = um
  modified_base 15: mod_base = um
  modified_base 16: mod_base = OTHER; note = locked nucleic acid
  modified_base 17: mod_base = cm
  modified_base 18: mod_base = cm
  modified_base 19: mod_base = OTHER; note = 2'O-methyl-adenosine
  modified_base 20: mod_base = OTHER; note = locked nucleic acid
  modified_base 21: mod_base = gm
  modified_base 22: mod_base = gm
  modified_base 23: mod_base = um
  modified_base 24: mod_base = OTHER; note = locked nucleic acid
  modified_base 25: mod_base = gm
  modified_base 26: mod_base = cm
  modified_base 27: mod_base = cm
  modified_base 28: mod_base = OTHER; note = locked nucleic acid
  modified_base 29: mod_base = um
  modified_base 30: mod_base = gm
  modified_base 31: mod_base = gm
  modified_base 32: mod_base = OTHER; note = locked nucleic acid
  modified_base 33: mod_base = gm
  misc_feature 1..15: note = At this position backbone is RNA
  misc_feature 17..33: note = At this position backbone is RNA
gccaggtaagtattttccagggtcgccatggcg

SEQ ID NO: 186 - DNA, 33 bp, synthetic construct
  misc_feature 1..33: note = Description of sequence: bifunctional oligonucleotide
  source 1..33: mol_type = other DNA
  modified_base 1: mod_base = gm
  modified_base 2: mod_base = cm
  modified_base 3: mod_base = cm
  modified_base 4: mod_base = OTHER; note = 2'O-methyl-adenosine
  modified_base 5: mod_base = gm
  modified_base 6: mod_base = gm
  modified_base 7: mod_base = um
  modified_base 8: mod_base = OTHER; note = 2'O-methyl-adenosine
  modified_base 9: mod_base = OTHER; note = 2'O-methyl-adenosine
  modified_base 10: mod_base = gm
  modified_base 11: mod_base = um
  modified_base 12: mod_base = OTHER; note = 2'O-methyl-adenosine
  modified_base 13: mod_base = um
  modified_base 14: mod_base = um
  modified_base 15: mod_base = um
  modified_base 16: mod_base = OTHER; note = locked nucleic acid
  modified_base 17: mod_base = um
  modified_base 18: mod_base = cm
  modified_base 19: mod_base = cm
  modified_base 20: mod_base = OTHER; note = locked nucleic acid
  modified_base 21: mod_base = gm
  modified_base 22: mod_base = gm
  modified_base 23: mod_base = gm
  modified_base 24: mod_base = OTHER; note = locked nucleic acid
  modified_base 25: mod_base = cm
  modified_base 26: mod_base = gm
  modified_base 27: mod_base = cm
  modified_base 28: mod_base = OTHER; note = locked nucleic acid
  modified_base 29: mod_base = OTHER; note = 2'O-methyl-adenosine
  modified_base 30: mod_base = um
  modified_base 31: mod_base = gm
  modified_base 32: mod_base = OTHER; note = locked nucleic acid
  modified_base 33: mod_base = cm
  misc_feature 1..15: note = At this position backbone is RNA
  misc_feature 17..23: note = At this position backbone is RNA
  misc_feature 25..33: note = At this position backbone is RNA
gccaggtaagtatttttccagggtcgccatggc

SEQ ID NO: 187 - DNA, 33 bp, synthetic construct
  misc_feature 1..33: note = Description of sequence: bifunctional oligonucleotide
  source 1..33: mol_type = other DNA
  modified_base 1: mod_base = gm
  modified_base 2: mod_base = cm
  modified_base 3: mod_base = cm
  modified_base 4: mod_base = OTHER; note = 2'O-methyl-adenosine
  modified_base 5: mod_base = gm
  modified_base 6: mod_base = gm
  modified_base 7: mod_base = um
  modified_base 8: mod_base = OTHER; note = 2'O-methyl-adenosine
  modified_base 9: mod_base = OTHER; note = 2'O-methyl-adenosine
  modified_base 10: mod_base = gm
  modified_base 11: mod_base = um
  modified_base 12: mod_base = OTHER; note = 2'O-methyl-adenosine
  modified_base 13: mod_base = um
  modified_base 14: mod_base = cm
  modified_base 15: mod_base = um
  modified_base 16: mod_base = OTHER; note = locked nucleic acid
  modified_base 17: mod_base = um
  modified_base 18: mod_base = um
  modified_base 19: mod_base = cm
  modified_base 20: mod_base = OTHER; note = locked nucleic acid
  modified_base 21: mod_base = OTHER; note = 2'O-methyl-adenosine
  modified_base 22: mod_base = gm
  modified_base 23: mod_base = gm
  modified_base 24: mod_base = OTHER; note = locked nucleic acid
  modified_base 25: mod_base = um
  modified_base 26: mod_base = cm
  modified_base 27: mod_base = gm
  modified_base 28: mod_base = OTHER; note = locked nucleic acid
  modified_base 29: mod_base = cm
  modified_base 30: mod_base = OTHER; note = 2'O-methyl-adenosine
  modified_base 31: mod_base = um
  modified_base 32: mod_base = OTHER; note = locked nucleic acid
  modified_base 33: mod_base = gm
  misc_feature 1..15: note = At this position backbone is RNA
  misc_feature 17..33: note = At this position backbone is RNA
gccaggtaagtatcttttccagggtcgccatgg

SEQ ID NO: 188 - DNA, 33 bp, synthetic construct
  misc_feature 1..33: note = Description of sequence: bifunctional oligonucleotide
  source 1..33: mol_type = other DNA
  modified_base 1: mod_base = gm
  modified_base 2: mod_base = cm
  modified_base 3: mod_base = cm
  modified_base 4: mod_base = OTHER; note = 2'O-methyl-adenosine
  modified_base 5: mod_base = gm
  modified_base 6: mod_base = gm
  modified_base 7: mod_base = um
  modified_base 8: mod_base = OTHER; note = 2'O-methyl-adenosine
  modified_base 9: mod_base = OTHER; note = 2'O-methyl-adenosine
  modified_base 10: mod_base = gm
  modified_base 11: mod_base = um
  modified_base 12: mod_base = OTHER; note = 2'O-methyl-adenosine
  modified_base 13: mod_base = um
  modified_base 14: mod_base = gm
  modified_base 15: mod_base = cm
  modified_base 16: mod_base = OTHER; note = locked nucleic acid
  modified_base 17: mod_base = um
  modified_base 18: mod_base = um
  modified_base 19: mod_base = um
  modified_base 20: mod_base = OTHER; note = locked nucleic acid
  modified_base 21: mod_base = cm
  modified_base 22: mod_base = OTHER; note = 2'O-methyl-adenosine
  modified_base 23: mod_base = gm
  modified_base 24: mod_base = OTHER; note = locked nucleic acid
  modified_base 25: mod_base = gm
  modified_base 26: mod_base = um
  modified_base 27: mod_base = cm
  modified_base 28: mod_base = OTHER; note = locked nucleic acid
  modified_base 29: mod_base = cm
  modified_base 30: mod_base = cm
  modified_base 31: mod_base = OTHER; note = 2'O-methyl-adenosine
  modified_base 32: mod_base = OTHER; note = locked nucleic acid
  modified_base 33: mod_base = gm
  misc_feature 1..15: note = At this position backbone is RNA
  misc_feature 17..31: note = At this position backbone is RNA
  misc_feature 33: note = At this position backbone is RNA
gccaggtaagtatgcttttccagggtcgccatg

SEQ ID NO: 189 - DNA, 33 bp, synthetic construct
  misc_feature 1..33: note = Description of sequence: bifunctional oligonucleotide
  source 1..33: mol_type = other DNA
  modified_base 1: mod_base = gm
  modified_base 2: mod_base = cm
  modified_base 3: mod_base = cm
  modified_base 4: mod_base = OTHER; note = 2'O-methyl-adenosine
  modified_base 5: mod_base = gm
  modified_base 6: mod_base = gm
  modified_base 7: mod_base = um
  modified_base 8: mod_base = OTHER; note = 2'O-methyl-adenosine
  modified_base 9: mod_base = OTHER; note = 2'O-methyl-adenosine
  modified_base 10: mod_base = gm
  modified_base 11: mod_base = um
  modified_base 12: mod_base = OTHER; note = 2'O-methyl-adenosine
  modified_base 13: mod_base = um
  modified_base 14: mod_base = OTHER; note = 2'O-methyl-adenosine
  modified_base 15: mod_base = gm
  modified_base 16: mod_base = OTHER; note = locked nucleic acid
  modified_base 17: mod_base = um
  modified_base 18: mod_base = um
  modified_base 19: mod_base = um
  modified_base 20: mod_base = OTHER; note = locked nucleic acid
  modified_base 21: mod_base = cm
  modified_base 22: mod_base = cm
  modified_base 23: mod_base = OTHER; note = 2'O-methyl-adenosine
  modified_base 24: mod_base = OTHER; note = locked nucleic acid
  modified_base 25: mod_base = gm
  modified_base 26: mod_base = gm
  modified_base 27: mod_base = um
  modified_base 28: mod_base = OTHER; note = locked nucleic acid
  modified_base 29: mod_base = gm
  modified_base 30: mod_base = cm
  modified_base 31: mod_base = cm
  modified_base 32: mod_base = OTHER; note = locked nucleic acid
  modified_base 33: mod_base = um
  misc_feature 1..19: note = At this position backbone is RNA
  misc_feature 21..33: note = At this position backbone is RNA
gccaggtaagtatagcttttccagggtcgccat

SEQ ID NO: 190 - DNA, 33 bp, synthetic construct
  misc_feature 1..33: note = Description of sequence: bifunctional oligonucleotide
  source 1..33: mol_type = other DNA
  modified_base 1: mod_base = gm
  modified_base 2: mod_base = cm
  modified_base 3: mod_base = cm
  modified_base 4: mod_base = OTHER; note = 2'O-methyl-adenosine
  modified_base 5: mod_base = gm
  modified_base 6: mod_base = gm
  modified_base 7: mod_base = um
  modified_base 8: mod_base = OTHER; note = 2'O-methyl-adenosine
  modified_base 9: mod_base = OTHER; note = 2'O-methyl-adenosine
  modified_base 10: mod_base = gm
  modified_base 11: mod_base = um
  modified_base 12: mod_base = OTHER; note = 2'O-methyl-adenosine
  modified_base 13: mod_base = um
  modified_base 14: mod_base = cm
  modified_base 15: mod_base = OTHER; note = 2'O-methyl-adenosine
  modified_base 16: mod_base = OTHER; note = locked nucleic acid
  modified_base 17: mod_base = cm
  modified_base 18: mod_base = um
  modified_base 19: mod_base = um
  modified_base 20: mod_base = OTHER; note = locked nucleic acid
  modified_base 21: mod_base = um
  modified_base 22: mod_base = cm
  modified_base 23: mod_base = cm
  modified_base 24: mod_base = OTHER; note = locked nucleic acid
  modified_base 25: mod_base = gm
  modified_base 26: mod_base = gm
  modified_base 27: mod_base = gm
  modified_base 28: mod_base = OTHER; note = locked nucleic acid
  modified_base 29: mod_base = cm
  modified_base 30: mod_base = gm
  modified_base 31: mod_base = cm
  modified_base 32: mod_base = OTHER; note = locked nucleic acid
  modified_base 33: mod_base = OTHER; note = 2'O-methyl-adenosine
  misc_feature 1..19: note = At this position backbone is RNA
  misc_feature 21..27: note = At this position backbone is RNA
  misc_feature 29..33: note = At this position backbone is RNA
gccaggtaagtatcagcttttccagggtcgcca

SEQ ID NO: 191 - DNA, 33 bp, synthetic construct
  misc_feature 1..33: note = Description of sequence: bifunctional oligonucleotide
  source 1..33: mol_type = other DNA
  modified_base 1: mod_base = gm
  modified_base 2: mod_base = cm
  modified_base 3: mod_base = cm
  modified_base 4: mod_base = OTHER; note = 2'O-methyl-adenosine
  modified_base 5: mod_base = gm
  modified_base 6: mod_base = gm
  modified_base 7: mod_base = um
  modified_base 8: mod_base = OTHER; note = 2'O-methyl-adenosine
  modified_base 9: mod_base = OTHER; note = 2'O-methyl-adenosine
  modified_base 10: mod_base = gm
  modified_base 11: mod_base = um
  modified_base 12: mod_base = OTHER; note = 2'O-methyl-adenosine
  modified_base 13: mod_base = um
  modified_base 14: mod_base = um
  modified_base 15: mod_base = cm
  modified_base 16: mod_base = OTHER; note = locked nucleic acid
  modified_base 17: mod_base = gm
  modified_base 18: mod_base = cm
  modified_base 19: mod_base = um
  modified_base 20: mod_base = OTHER; note = locked nucleic acid
  modified_base 21: mod_base = um
  modified_base 22: mod_base = um
  modified_base 23: mod_base = cm
  modified_base 24: mod_base = OTHER; note = locked nucleic acid
  modified_base 25: mod_base = OTHER; note = 2'O-methyl-adenosine
  modified_base 26: mod_base = gm
  modified_base 27: mod_base = gm
  modified_base 28: mod_base = OTHER; note = locked nucleic acid
  modified_base 29: mod_base = um
  modified_base 30: mod_base = cm
  modified_base 31: mod_base = gm
  modified_base 32: mod_base = OTHER; note = locked nucleic acid
  modified_base 33: mod_base = cm
  misc_feature 1..19: note = At this position backbone is RNA
  misc_feature 21..33: note = At this position backbone is RNA
gccaggtaagtattcagcttttccagggtcgcc

SEQ ID NO: 192 - DNA, 33 bp, synthetic construct
  misc_feature 1..33: note = Description of sequence: bifunctional oligonucleotide
  source 1..33: mol_type = other DNA
  modified_base 1: mod_base = gm
  modified_base 2: mod_base = cm
  modified_base 3: mod_base = cm
  modified_base 4: mod_base = OTHER; note = 2'O-methyl-adenosine
  modified_base 5: mod_base = gm
  modified_base 6: mod_base = gm
  modified_base 7: mod_base = um
  modified_base 8: mod_base = OTHER; note = 2'O-methyl-adenosine
  modified_base 9: mod_base = OTHER; note = 2'O-methyl-adenosine
  modified_base 10: mod_base = gm
  modified_base 11: mod_base = um
  modified_base 12: mod_base = OTHER; note = 2'O-methyl-adenosine
  modified_base 13: mod_base = um
  modified_base 14: mod_base = OTHER; note = 2'O-methyl-adenosine
  modified_base 15: mod_base = um
  modified_base 16: mod_base = OTHER; note = locked nucleic acid
  modified_base 17: mod_base = OTHER; note = 2'O-methyl-adenosine
  modified_base 18: mod_base = gm
  modified_base 19: mod_base = cm
  modified_base 20: mod_base = OTHER; note = locked nucleic acid
  modified_base 21: mod_base = um
  modified_base 22: mod_base = um
  modified_base 23: mod_base = um
  modified_base 24: mod_base = OTHER; note = locked nucleic acid
  modified_base 25: mod_base = cm
  modified_base 26: mod_base = OTHER; note = 2'O-methyl-adenosine
  modified_base 27: mod_base = gm
  modified_base 28: mod_base = OTHER; note = locked nucleic acid
  modified_base 29: mod_base = gm
  modified_base 30: mod_base = um
  modified_base 31: mod_base = cm
  modified_base 32: mod_base = OTHER; note = locked nucleic acid
  modified_base 33: mod_base = cm
  misc_feature 1..19: note = At this position backbone is RNA
  misc_feature 21..33: note = At this position backbone is RNA
gccaggtaagtatatcagcttttccagggtcgc

SEQ ID NO: 193 - DNA, 33 bp, synthetic construct
  misc_feature 1..33: note = Description of sequence: bifunctional oligonucleotide
  source 1..33: mol_type = other DNA
  modified_base 1: mod_base = gm
  modified_base 2: mod_base = cm
  modified_base 3: mod_base = cm
  modified_base 4: mod_base = OTHER; note = 2'O-methyl-adenosine
  modified_base 5: mod_base = gm
  modified_base 6: mod_base = gm
  modified_base 7: mod_base = um
  modified_base 8: mod_base = OTHER; note = 2'O-methyl-adenosine
  modified_base 9: mod_base = OTHER; note = 2'O-methyl-adenosine
  modified_base 10: mod_base = gm
  modified_base 11: mod_base = um
  modified_base 12: mod_base = OTHER; note = 2'O-methyl-adenosine
  modified_base 13: mod_base = um
  modified_base 14: mod_base = cm
  modified_base 15: mod_base = OTHER; note = 2'O-methyl-adenosine
  modified_base 16: mod_base = OTHER; note = locked nucleic acid
  modified_base 17: mod_base = cm
  modified_base 18: mod_base = OTHER; note = 2'O-methyl-adenosine
  modified_base 19: mod_base = gm
  modified_base 20: mod_base = OTHER; note = locked nucleic acid
  modified_base 21: mod_base = um
  modified_base 22: mod_base = um
  modified_base 23: mod_base = um
  modified_base 24: mod_base = OTHER; note = locked nucleic acid
  modified_base 25: mod_base = cm
  modified_base 26: mod_base = cm
  modified_base 27: mod_base = OTHER; note = 2'O-methyl-adenosine
  modified_base 28: mod_base = OTHER; note = locked nucleic acid
  modified_base 29: mod_base = gm
  modified_base 30: mod_base = gm
  modified_base 31: mod_base = um
  modified_base 32: mod_base = OTHER; note = locked nucleic acid
  modified_base 33: mod_base = gm
  misc_feature 1..15: note = At this position backbone is RNA
  misc_feature 17..23: note = At this position backbone is RNA
  misc_feature 25..33: note = At this position backbone is RNA
gccaggtaagtatcatcagcttttccagggtcg

SEQ ID NO: 194 - DNA, 33 bp, synthetic construct
  misc_feature 1..33: note = Description of sequence: bifunctional oligonucleotide
  source 1..33: mol_type = other DNA
  modified_base 1: mod_base = gm
  modified_base 2: mod_base = cm
  modified_base 3: mod_base = cm
  modified_base 4: mod_base = OTHER; note = 2'O-methyl-adenosine
  modified_base 5: mod_base = gm
  modified_base 6: mod_base = gm
  modified_base 7: mod_base = um
  modified_base 8: mod_base = OTHER; note = 2'O-methyl-adenosine
  modified_base 9: mod_base = OTHER; note = 2'O-methyl-adenosine
  modified_base 10: mod_base = gm
  modified_base 11: mod_base = um
  modified_base 12: mod_base = OTHER; note = 2'O-methyl-adenosine
  modified_base 13: mod_base = um
  modified_base 14: mod_base = um
  modified_base 15: mod_base = cm
  modified_base 16: mod_base = OTHER; note = locked nucleic acid
  modified_base 17: mod_base = um
  modified_base 18: mod_base = cm
  modified_base 19: mod_base = OTHER; note = 2'O-methyl-adenosine
  modified_base 20: mod_base = OTHER; note = locked nucleic acid
  modified_base 21: mod_base = cm
  modified_base 22: mod_base = um
  modified_base 23: mod_base = um
  modified_base 24: mod_base = OTHER; note = locked nucleic acid
  modified_base 25: mod_base = um
  modified_base 26: mod_base = cm
  modified_base 27: mod_base = cm
  modified_base 28: mod_base = OTHER; note = locked nucleic acid
  modified_base 29: mod_base = gm
  modified_base 30: mod_base = gm
  modified_base 31: mod_base = gm
  modified_base 32: mod_base = OTHER; note = locked nucleic acid
  modified_base 33: mod_base = cm
  misc_feature 1..23: note = At this position backbone is RNA
  misc_feature 25..31: note = At this position backbone is RNA
  misc_feature 33: note = At this position backbone is RNA
gccaggtaagtattcatcagcttttccagggtc

SEQ ID NO: 195 - DNA, 33 bp, synthetic construct
  misc_feature 1..33: note = Description of sequence: bifunctional oligonucleotide
  source 1..33: mol_type = other DNA
  modified_base 1: mod_base = gm
  modified_base 2: mod_base = cm
  modified_base 3: mod_base = cm
  modified_base 4: mod_base = OTHER; note = 2'O-methyl-adenosine
  modified_base 5: mod_base = gm
  modified_base 6: mod_base = gm
  modified_base 7: mod_base = um
  modified_base 8: mod_base = OTHER; note = 2'O-methyl-adenosine
  modified_base 9: mod_base = OTHER; note = 2'O-methyl-adenosine
  modified_base 10: mod_base = gm
  modified_base 11: mod_base = um
  modified_base 12: mod_base = OTHER; note = 2'O-methyl-adenosine
  modified_base 13: mod_base = um
  modified_base 14: mod_base = um
  modified_base 15: mod_base = um
  modified_base 16: mod_base = OTHER; note = locked nucleic acid
  modified_base 17: mod_base = OTHER; note = 2'O-methyl-adenosine
  modified_base 18: mod_base = um
  modified_base 19: mod_base = cm
  modified_base 20: mod_base = OTHER; note = locked nucleic acid
  modified_base 21: mod_base = gm
  modified_base 22: mod_base = cm
  modified_base 23: mod_base = um
  modified_base 24: mod_base = OTHER; note = locked nucleic acid
  modified_base 25: mod_base = um
  modified_base 26: mod_base = um
  modified_base 27: mod_base = cm
  modified_base 28: mod_base = OTHER; note = locked nucleic acid
  modified_base 29: mod_base = OTHER; note = 2'O-methyl-adenosine
  modified_base 30: mod_base = gm
  modified_base 31: mod_base = gm
  modified_base 32: mod_base = OTHER; note = locked nucleic acid
  modified_base 33: mod_base = um
  misc_feature 1..23: note = At this position backbone is RNA
  misc_feature 25..33: note = At this position backbone is RNA
gccaggtaagtatttcatcagcttttccagggt

SEQ ID NO: 196 - DNA, 33 bp, synthetic construct
  misc_feature 1..33: note = Description of sequence: bifunctional oligonucleotide
  source 1..33: mol_type = other DNA
  modified_base 1: mod_base = gm
  modified_base 2: mod_base = cm
  modified_base 3: mod_base = cm
  modified_base 4: mod_base = OTHER; note = 2'O-methyl-adenosine
  modified_base 5: mod_base = gm
  modified_base 6: mod_base = gm
  modified_base 7: mod_base = um
  modified_base 8: mod_base = OTHER; note = 2'O-methyl-adenosine
  modified_base 9: mod_base = OTHER; note = 2'O-methyl-adenosine
  modified_base 10: mod_base = gm
  modified_base 11: mod_base = um
  modified_base 12: mod_base = OTHER; note = 2'O-methyl-adenosine
  modified_base 13: mod_base = um
  modified_base 14: mod_base = cm
  modified_base 15: mod_base = um
  modified_base 16: mod_base = OTHER; note = locked nucleic acid
  modified_base 17: mod_base = cm
  modified_base 18: mod_base = OTHER; note = 2'O-methyl-adenosine
  modified_base 19: mod_base = um
  modified_base 20: mod_base = OTHER; note = locked nucleic acid
  modified_base 21: mod_base = OTHER; note = 2'O-methyl-adenosine
  modified_base 22: mod_base = gm
  modified_base 23: mod_base = cm
  modified_base 24: mod_base = OTHER; note = locked nucleic acid
  modified_base 25: mod_base = um
  modified_base 26: mod_base = um
  modified_base 27: mod_base = um
  modified_base 28: mod_base = OTHER; note = locked nucleic acid
  modified_base 29: mod_base = cm
  modified_base 30: mod_base = OTHER; note = 2'O-methyl-adenosine
  modified_base 31: mod_base = gm
  modified_base 32: mod_base = OTHER; note = locked nucleic acid
  modified_base 33: mod_base = gm
  misc_feature 1..15: note = At this position backbone is RNA
  misc_feature 17..23: note = At this position backbone is RNA
  misc_feature 25..33: note = At this position backbone is RNA
gccaggtaagtatcttcatcagcttttccaggg

SEQ ID NO: 197 - DNA, 33 bp, synthetic construct
  misc_feature 1..33: note = Description of sequence: bifunctional oligonucleotide
  source 1..33: mol_type = other DNA
  modified_base 1: mod_base = gm
  modified_base 2: mod_base = cm
  modified_base 3: mod_base = cm
  modified_base 4: mod_base = OTHER; note = 2'O-methyl-adenosine
  modified_base 5: mod_base = gm
  modified_base 6: mod_base = gm
  modified_base 7: mod_base = um
  modified_base 8: mod_base = OTHER; note = 2'O-methyl-adenosine
  modified_base 9: mod_base = OTHER; note = 2'O-methyl-adenosine
  modified_base 10: mod_base = gm
  modified_base 11: mod_base = um
  modified_base 12: mod_base = OTHER; note = 2'O-methyl-adenosine
  modified_base 13: mod_base = um
  modified_base 14: mod_base = cm
  modified_base 15: mod_base = cm
  modified_base 16: mod_base = OTHER; note = locked nucleic acid
  modified_base 17: mod_base = um
  modified_base 18: mod_base = cm
  modified_base 19: mod_base = OTHER; note = 2'O-methyl-adenosine
  modified_base 20: mod_base = OTHER; note = locked nucleic acid
  modified_base 21: mod_base = cm
  modified_base 22: mod_base = OTHER; note = 2'O-methyl-adenosine
  modified_base 23: mod_base = gm
  modified_base 24: mod_base = OTHER; note = locked nucleic acid
  modified_base 25: mod_base = um
  modified_base 26: mod_base = um
  modified_base 27: mod_base = um
  modified_base 28: mod_base = OTHER; note = locked nucleic acid
  modified_base 29: mod_base = cm
  modified_base 30: mod_base = cm
  modified_base 31: mod_base = OTHER; note = 2'O-methyl-adenosine
  modified_base 32: mod_base = OTHER; note = locked nucleic acid
  modified_base 33: mod_base = gm
  misc_feature 1..15: note = At this position backbone is RNA
  misc_feature 17..19: note = At this position backbone is RNA
  misc_feature 21..27: note = At this position backbone is RNA
  misc_feature 29..33: note = At this position backbone is RNA
gccaggtaagtatccttcatcagcttttccagg

SEQ ID NO: 198 - DNA, 33 bp, synthetic construct
  misc_feature 1..33: note = Description of sequence: bifunctional oligonucleotide
  source 1..33: mol_type = other DNA
  modified_base 1: mod_base = gm
  modified_base 2: mod_base = cm
  modified_base 3: mod_base = cm
  modified_base 4: mod_base = OTHER; note = 2'O-methyl-adenosine
  modified_base 5: mod_base = gm
  modified_base 6: mod_base = gm
  modified_base 7: mod_base = um
  modified_base 8: mod_base = OTHER; note = 2'O-methyl-adenosine
  modified_base 9: mod_base = OTHER; note = 2'O-methyl-adenosine
  modified_base 10: mod_base = gm
  modified_base 11: mod_base = um
  modified_base 12: mod_base = OTHER; note = 2'O-methyl-adenosine
  modified_base 13: mod_base = um
  modified_base 14: mod_base = gm
  modified_base 15: mod_base = cm
  modified_base 16: mod_base = OTHER; note = locked nucleic acid
  modified_base 17: mod_base = um
  modified_base 18: mod_base = um
  modified_base 19: mod_base = cm
  modified_base 20: mod_base = OTHER; note = locked nucleic acid
  modified_base 21: mod_base = um
  modified_base 22: mod_base = cm
  modified_base 23: mod_base = OTHER; note = 2'O-methyl-adenosine
  modified_base 24: mod_base = OTHER; note = locked nucleic acid
  modified_base 25: mod_base = cm
  modified_base 26: mod_base = um
  modified_base 27: mod_base = um
  modified_base 28: mod_base = OTHER; note = locked nucleic acid
  modified_base 29: mod_base = um
  modified_base 30: mod_base = cm
  modified_base 31: mod_base = cm
  modified_base 32: mod_base = OTHER; note = locked nucleic acid
  modified_base 33: mod_base = gm
  misc_feature 1..27: note = At this position backbone is RNA
  misc_feature 29..33: note = At this position backbone is RNA
gccaggtaagtatgccttcatcagcttttccag

SEQ ID NO: 199 - DNA, 33 bp, synthetic construct
  misc_feature 1..33: note = Description of sequence: bifunctional oligonucleotide
  source 1..33: mol_type = other DNA
  modified_base 1: mod_base = gm
  modified_base 2: mod_base = cm
  modified_base 3: mod_base = cm
  modified_base 4: mod_base = OTHER; note = 2'O-methyl-adenosine
  modified_base 5: mod_base = gm
  modified_base 6: mod_base = gm
  modified_base 7: mod_base = um
  modified_base 8: mod_base = OTHER; note = 2'O-methyl-adenosine
  modified_base 9: mod_base = OTHER; note = 2'O-methyl-adenosine
  modified_base 10: mod_base = gm
  modified_base 11: mod_base = um
  modified_base 12: mod_base = OTHER; note = 2'O-methyl-adenosine
  modified_base 13: mod_base = um
  modified_base 14: mod_base = gm
  modified_base 15: mod_base = gm
  modified_base 16: mod_base = OTHER; note = locked nucleic acid
  modified_base 17: mod_base = cm
  modified_base 18: mod_base = um
  modified_base 19: mod_base = um
  modified_base 20: mod_base = OTHER; note = locked nucleic acid
  modified_base 21: mod_base = OTHER; note = 2'O-methyl-adenosine
  modified_base 22: mod_base = um
  modified_base 23: mod_base = cm
  modified_base 24: mod_base = OTHER; note = locked nucleic acid
  modified_base 25: mod_base = gm
  modified_base 26: mod_base = cm
  modified_base 27: mod_base = um
  modified_base 28: mod_base = OTHER; note = locked nucleic acid
  modified_base 29: mod_base = um
  modified_base 30: mod_base = um
  modified_base 31: mod_base = cm
  modified_base 32: mod_base = OTHER; note = locked nucleic acid
  modified_base 33: mod_base = OTHER; note = 2'O-methyl-adenosine
  misc_feature 1..27: note = At this position backbone is RNA
  misc_feature 29..33: note = At this position backbone is RNA
gccaggtaagtatggccttcatcagcttttcca

SEQ ID NO: 200 - DNA, 33 bp, synthetic construct
  misc_feature 1..33: note = Description of sequence: bifunctional oligonucleotide
  source 1..33: mol_type = other DNA
  modified_base 1: mod_base = gm
  modified_base 2: mod_base = cm
  modified_base 3: mod_base = cm
  modified_base 4: mod_base = OTHER; note = 2'O-methyl-adenosine
  modified_base 5: mod_base = gm
  modified_base 6: mod_base = gm
  modified_base 7: mod_base = um
  modified_base 8: mod_base = OTHER; note = 2'O-methyl-adenosine
  modified_base 9: mod_base = OTHER; note = 2'O-methyl-adenosine
  modified_base 10: mod_base = gm
  modified_base 11: mod_base = um
  modified_base 12: mod_base = OTHER; note = 2'O-methyl-adenosine
  modified_base 13: mod_base = um
  modified_base 14: mod_base = OTHER; note = 2'O-methyl-adenosine
  modified_base 15: mod_base = gm
  modified_base 16: mod_base = OTHER; note = locked nucleic acid
  modified_base 17: mod_base = cm
  modified_base 18: mod_base = cm
  modified_base 19: mod_base = um
  modified_base 20: mod_base = OTHER; note = locked nucleic acid
  modified_base 21: mod_base = cm
  modified_base 22: mod_base = OTHER; note = 2'O-methyl-adenosine
  modified_base 23: mod_base = um
  modified_base 24: mod_base = OTHER; note = locked nucleic acid
  modified_base 25: mod_base = OTHER; note = 2'O-methyl-adenosine
  modified_base 26: mod_base = gm
  modified_base 27: mod_base = cm
  modified_base 28: mod_base = OTHER; note = locked nucleic acid
  modified_base 29: mod_base = um
  modified_base 30: mod_base = um
  modified_base 31: mod_base = um
  modified_base 32: mod_base = OTHER; note = locked nucleic acid
  modified_base 33: mod_base = cm
  misc_feature 1..19: note = At this position backbone is RNA
  misc_feature 21..27: note = At this position backbone is RNA
  misc_feature 29..33: note = At this position backbone is RNA
gccaggtaagtataggccttcatcagcttttcc

SEQ ID NO: 201 - DNA, 33 bp, synthetic construct
  misc_feature 1..33: note = Description of sequence: bifunctional oligonucleotide
  source 1..33: mol_type = other DNA
  modified_base 1: mod_base = gm
  modified_base 2: mod_base = cm
  modified_base 3: mod_base = cm
  modified_base 4: mod_base = OTHER; note = 2'O-methyl-adenosine
  modified_base 5: mod_base = gm
  modified_base 6: mod_base = gm
  modified_base 7: mod_base = um
  modified_base 8: mod_base = OTHER; note = 2'O-methyl-adenosine
  modified_base 9: mod_base = OTHER; note = 2'O-methyl-adenosine
  modified_base 10: mod_base = gm
  modified_base 11: mod_base = um
  modified_base 12: mod_base = OTHER; note = 2'O-methyl-adenosine
  modified_base 13: mod_base = um
  modified_base 14: mod_base = OTHER; note = 2'O-methyl-adenosine
  modified_base 15: mod_base = OTHER; note = 2'O-methyl-adenosine
  modified_base 16: mod_base = OTHER; note = locked nucleic acid
  modified_base 17: mod_base = gm
  modified_base 18: mod_base = cm
  modified_base 19: mod_base = cm
  modified_base 20: mod_base = OTHER; note = locked nucleic acid
  modified_base 21: mod_base = um
  modified_base 22: mod_base = cm
  modified_base 23: mod_base = OTHER; note = 2'O-methyl-adenosine
  modified_base 24: mod_base = OTHER; note = locked nucleic acid
  modified_base 25: mod_base = cm
  modified_base 26: mod_base = OTHER; note = 2'O-methyl-adenosine
  modified_base 27: mod_base = gm
  modified_base 28: mod_base = OTHER; note = locked nucleic acid
  modified_base 29: mod_base = um
  modified_base 30: mod_base = um
  modified_base 31: mod_base = um
  modified_base 32: mod_base = OTHER; note = locked nucleic acid
  modified_base 33: mod_base = cm
  misc_feature 1..19: note = At this position backbone is RNA
  misc_feature 21..23: note = At this position backbone is RNA
  misc_feature 25..31: note = At this position backbone is RNA
  misc_feature 33: note = At this position backbone is RNA
gccaggtaagtataaggccttcatcagcttttc

SEQ ID NO: 202 - DNA, 33 bp, synthetic construct
  misc_feature 1..33: note = Description of sequence: bifunctional oligonucleotide
  source 1..33: mol_type = other DNA
  modified_base 1: mod_base = gm
  modified_base 2: mod_base = cm
  modified_base 3: mod_base = cm
  modified_base 4: mod_base = OTHER; note = 2'O-methyl-adenosine
  modified_base 5: mod_base = gm
  modified_base 6: mod_base = gm
  modified_base 7: mod_base = um
  modified_base 8: mod_base = OTHER; note = 2'O-methyl-adenosine
  modified_base 9: mod_base = OTHER; note = 2'O-methyl-adenosine
  modified_base 10: mod_base = gm
  modified_base 11: mod_base = um
  modified_base 12: mod_base = OTHER; note = 2'O-methyl-adenosine
  modified_base 13: mod_base = um
  modified_base 14: mod_base = gm
  modified_base 15: mod_base = OTHER; note = 2'O-methyl-adenosine
  modified_base 16: mod_base = OTHER; note = locked nucleic acid
  modified_base 17: mod_base = gm
  modified_base 18: mod_base = gm
  modified_base 19: mod_base = cm
  modified_base 20: mod_base = OTHER; note = locked nucleic acid
  modified_base 21: mod_base = um
  modified_base 22: mod_base = um
  modified_base 23: mod_base = cm
  modified_base 24: mod_base = OTHER; note = locked nucleic acid
  modified_base 25: mod_base = um
  modified_base 26: mod_base = cm
  modified_base 27: mod_base = OTHER; note = 2'O-methyl-adenosine
  modified_base 28: mod_base = OTHER; note = locked nucleic acid
  modified_base 29: mod_base = cm
  modified_base 30: mod_base = um
  modified_base 31: mod_base = um
  modified_base 32: mod_base = OTHER; note = locked nucleic acid
  modified_base 33: mod_base = um
  misc_feature 1..31: note = At this position backbone is RNA
  misc_feature 33: note = At this position backbone is RNA
gccaggtaagtatgaaggccttcatcagctttt

SEQ ID NO: 203 - DNA, 33 bp, synthetic construct
  misc_feature 1..33: note = Description of sequence: bifunctional oligonucleotide
  source 1..33: mol_type = other DNA
  modified_base 1: mod_base = gm
  modified_base 2: mod_base = cm
  modified_base 3: mod_base = cm
  modified_base 4: mod_base = OTHER; note = 2'O-methyl-adenosine
  modified_base 5: mod_base = gm
  modified_base 6: mod_base = gm
  modified_base 7: mod_base = um
  modified_base 8: mod_base = OTHER; note = 2'O-methyl-adenosine
  modified_base 9: mod_base = OTHER; note = 2'O-methyl-adenosine
  modified_base 10: mod_base = gm
  modified_base 11: mod_base = um
  modified_base 12: mod_base = OTHER; note = 2'O-methyl-adenosine
  modified_base 13: mod_base = um
  modified_base 14: mod_base = cm
  modified_base 15: mod_base = gm
  modified_base 16: mod_base = OTHER; note = locked nucleic acid
  modified_base 17: mod_base = OTHER; note = 2'O-methyl-adenosine
  modified_base 18: mod_base = gm
  modified_base 19: mod_base = gm
  modified_base 20: mod_base = OTHER; note = locked nucleic acid
  modified_base 21: mod_base = cm
  modified_base 22: mod_base = um
  modified_base 23: mod_base = um
  modified_base 24: mod_base = OTHER; note = locked nucleic acid
  modified_base 25: mod_base = OTHER; note = 2'O-methyl-adenosine
  modified_base 26: mod_base = um
  modified_base 27: mod_base = cm
  modified_base 28: mod_base = OTHER; note = locked nucleic acid
  modified_base 29: mod_base = gm
  modified_base 30: mod_base = cm
  modified_base 31: mod_base = um
  modified_base 32: mod_base = OTHER; note = locked nucleic acid
  modified_base 33: mod_base = um
  misc_feature 1..31: note = At this position backbone is RNA
  misc_feature 33: note = At this position backbone is RNA
gccaggtaagtatcgaaggccttcatcagcttt

SEQ ID NO: 204 - DNA, 33 bp, synthetic construct
  misc_feature 1..33: note = Description of sequence: bifunctional oligonucleotide
  source 1..33: mol_type = other DNA
  modified_base 1: mod_base = gm
  modified_base 2: mod_base = cm
  modified_base 3: mod_base = cm
  modified_base 4: mod_base = OTHER; note = 2'O-methyl-adenosine
  modified_base 5: mod_base = gm
  modified_base 6: mod_base = gm
  modified_base 7: mod_base = um
  modified_base 8: mod_base = OTHER; note = 2'O-methyl-adenosine
  modified_base 9: mod_base = OTHER; note = 2'O-methyl-adenosine
  modified_base 10: mod_base = gm
  modified_base 11: mod_base = um
  modified_base 12: mod_base = OTHER; note = 2'O-methyl-adenosine
  modified_base 13: mod_base = um
  modified_base 14: mod_base = um
  modified_base 15: mod_base = cm
  modified_base 16: mod_base = OTHER; note = locked nucleic acid
  modified_base 17: mod_base = OTHER; note = 2'O-methyl-adenosine
  modified_base 18: mod_base = OTHER; note = 2'O-methyl-adenosine
  modified_base 19: mod_base = gm
  modified_base 20: mod_base = OTHER; note = locked nucleic acid
  modified_base 21: mod_base = cm
  modified_base 22: mod_base = cm
  modified_base 23: mod_base = um
  modified_base 24: mod_base = OTHER; note = locked nucleic acid
  modified_base 25: mod_base = cm
  modified_base 26: mod_base = OTHER; note = 2'O-methyl-adenosine
  modified_base 27: mod_base = um
  modified_base 28: mod_base = OTHER; note = locked nucleic acid
  modified_base 29: mod_base = OTHER; note = 2'O-methyl-adenosine
  modified_base 30: mod_base = gm
  modified_base 31: mod_base = cm
  modified_base 32: mod_base = OTHER; note = locked nucleic acid
  modified_base 33: mod_base = um
  misc_feature 1..23: note = At this position backbone is RNA
  misc_feature 25..31: note = At this position backbone is RNA
  misc_feature 33: note = At this position backbone is RNA
gccaggtaagtattcgaaggccttcatcagctt

SEQ ID NO: 205 - DNA, 33 bp, synthetic construct
  misc_feature 1..33: note = Description of sequence: bifunctional oligonucleotide
  source 1..33: mol_type = other DNA
  modified_base 1: mod_base = gm
  modified_base 2: mod_base = cm
  modified_base 3: mod_base = cm
  modified_base 4: mod_base = OTHER; note = 2'O-methyl-adenosine
  modified_base 5: mod_base = gm
  modified_base 6: mod_base = gm
  modified_base 7: mod_base = um
  modified_base 8: mod_base = OTHER; note = 2'O-methyl-adenosine
  modified_base 9: mod_base = OTHER; note = 2'O-methyl-adenosine
  modified_base 10: mod_base = gm
  modified_base 11: mod_base = um
  modified_base 12: mod_base = OTHER; note = 2'O-methyl-adenosine
  modified_base 13: mod_base = um
  modified_base 14: mod_base = OTHER; note = 2'O-methyl-adenosine
  modified_base 15: mod_base = cm
  modified_base 16: mod_base = OTHER; note = locked nucleic acid
  modified_base 17: mod_base = cm
  modified_base 18: mod_base = gm
  modified_base 19: mod_base = OTHER; note = 2'O-methyl-adenosine
  modified_base 20: mod_base = OTHER; note = locked nucleic acid
  modified_base 21: mod_base = gm
  modified_base 22: mod_base = gm
  modified_base 23: mod_base = cm
  modified_base 24: mod_base = OTHER; note = locked nucleic acid
  modified_base 25: mod_base = um
  modified_base 26: mod_base = um
  modified_base 27: mod_base = cm
  modified_base 28: mod_base = OTHER; note = locked nucleic acid
  modified_base 29: mod_base = um
  modified_base 30: mod_base = cm
  modified_base 31: mod_base = OTHER; note = 2'O-methyl-adenosine
  modified_base 32: mod_base = OTHER; note = locked nucleic acid
  modified_base 33: mod_base = cm
  misc_feature 1..15: note = At this position backbone is RNA
  misc_feature 17..33: note = At this position backbone is RNA
gccaggtaagtatactcgaaggccttcatcagc

SEQ ID NO: 206 - RNA, 33 nt, synthetic construct
  misc_feature 1..33: note = Description of sequence: bifunctional oligonucleotide
  source 1..33: mol_type = other RNA
  modified_base 1: mod_base = gm
  modified_base 2: mod_base = cm
  modified_base 3: mod_base = cm
  modified_base 4: mod_base = OTHER; note = 2'O-methyl-adenosine
  modified_base 5: mod_base = gm
  modified_base 6: mod_base = gm
  modified_base 7: mod_base = um
  modified_base 8: mod_base = OTHER; note = 2'O-methyl-adenosine
  modified_base 9: mod_base = OTHER; note = 2'O-methyl-adenosine
  modified_base 10: mod_base = gm
  modified_base 11: mod_base = um
  modified_base 12: mod_base = OTHER; note = 2'O-methyl-adenosine
  modified_base 13: mod_base = um
  modified_base 14: mod_base = gm
  modified_base 15: mod_base = OTHER; note = 2'O-methyl-adenosine
  modified_base 16: mod_base = OTHER; note = locked nucleic acid
  modified_base 17: mod_base = um
  modified_base 18: mod_base = cm
  modified_base 19: mod_base = gm
  modified_base 20: mod_base = OTHER; note = locked nucleic acid
  modified_base 21: mod_base = OTHER; note = 2'O-methyl-adenosine
  modified_base 22: mod_base = gm
  modified_base 23: mod_base = gm
  modified_base 24: mod_base = OTHER; note = locked nucleic acid
  modified_base 25: mod_base = cm
  modified_base 26: mod_base = um
  modified_base 27: mod_base = um
  modified_base 28: mod_base = OTHER; note = locked nucleic acid
  modified_base 29: mod_base = OTHER; note = 2'O-methyl-adenosine
  modified_base 30: mod_base = um
  modified_base 31: mod_base = cm
  modified_base 32: mod_base = OTHER; note = locked nucleic acid
  modified_base 33: mod_base = gm
gccaggtaagtatgactcgaaggccttcatcag

SEQ ID NO: 207 - DNA, 33 bp, synthetic construct
  misc_feature 1..33: note = Description of sequence: bifunctional oligonucleotide
  source 1..33: mol_type = other DNA
  modified_base 1: mod_base = gm
  modified_base 2: mod_base = cm
  modified_base 3: mod_base = cm
  modified_base 4: mod_base = OTHER; note = 2'O-methyl-adenosine
  modified_base 5: mod_base = gm
  modified_base 6: mod_base = gm
  modified_base 7: mod_base = um
  modified_base 8: mod_base = OTHER; note = 2'O-methyl-adenosine
  modified_base 9: mod_base = OTHER; note = 2'O-methyl-adenosine
  modified_base 10: mod_base = gm
  modified_base 11: mod_base = um
  modified_base 12: mod_base = OTHER; note = 2'O-methyl-adenosine
  modified_base 13: mod_base = um
  modified_base 14: mod_base = gm
  modified_base 15: mod_base = gm
  modified_base 16: mod_base = OTHER; note = locked nucleic acid
  modified_base 17: mod_base = cm
  modified_base 18: mod_base = um
  modified_base 19: mod_base = cm
  modified_base 20: mod_base = OTHER; note = locked nucleic acid
  modified_base 21: mod_base = OTHER; note = 2'O-methyl-adenosine
  modified_base 22: mod_base = OTHER; note = 2'O-methyl-adenosine
  modified_base 23: mod_base = gm
  modified_base 24: mod_base = OTHER; note = locked nucleic acid
  modified_base 25: mod_base = cm
  modified_base 26: mod_base = cm
  modified_base 27: mod_base = um
  modified_base 28: mod_base = OTHER; note = locked nucleic acid
  modified_base 29: mod_base = cm
  modified_base 30: mod_base = OTHER; note = 2'O-methyl-adenosine
  modified_base 31: mod_base = um
  modified_base 32: mod_base = OTHER; note = locked nucleic acid
  modified_base 33: mod_base = OTHER; note = 2'O-methyl-adenosine
  misc_feature 1..27: note = At this position backbone is RNA
  misc_feature 29..33: note = At this position backbone is RNA
gccaggtaagtatggactcgaaggccttcatca

SEQ ID NO: 208 - DNA, 33 bp, synthetic construct
  misc_feature 1..33: note = Description of sequence: bifunctional oligonucleotide
  source 1..33: mol_type = other DNA
  modified_base 1: mod_base = gm
  modified_base 2: mod_base = cm
  modified_base 3: mod_base = cm
  modified_base 4: mod_base = OTHER; note = 2'O-methyl-adenosine
  modified_base 5: mod_base = gm
  modified_base 6: mod_base = gm
  modified_base 7: mod_base = um
  modified_base 8: mod_base = OTHER; note = 2'O-methyl-adenosine
  modified_base 9: mod_base = OTHER; note = 2'O-methyl-adenosine
  modified_base 10: mod_base = gm
  modified_base 11: mod_base = um
  modified_base 12: mod_base = OTHER; note = 2'O-methyl-adenosine
  modified_base 13: mod_base = um
  modified_base 14: mod_base = gm
  modified_base 15: mod_base = gm
  modified_base 16: mod_base = OTHER; note = locked nucleic acid
  modified_base 17: mod_base = OTHER; note = 2'O-methyl-adenosine
  modified_base 18: mod_base = cm
  modified_base 19: mod_base = um
  modified_base 20: mod_base = OTHER; note = locked nucleic acid
  modified_base 21: mod_base = gm
  modified_base 22: mod_base = OTHER; note = 2'O-methyl-adenosine
  modified_base 23: mod_base = OTHER; note = 2'O-methyl-adenosine
  modified_base 24: mod_base = OTHER; note = locked nucleic acid
  modified_base 25: mod_base = gm
  modified_base 26: mod_base = cm
  modified_base 27: mod_base = cm
  modified_base 28: mod_base = OTHER; note = locked nucleic acid
  modified_base 29: mod_base = um
  modified_base 30: mod_base = cm
  modified_base 31: mod_base = OTHER; note = 2'O-methyl-adenosine
  modified_base 32: mod_base = OTHER; note = locked nucleic acid
  modified_base 33: mod_base = cm
  misc_feature 1..27: note = At this position backbone is RNA
  misc_feature 29..31: note = At this position backbone is RNA
  misc_feature 33: note = At this position backbone is RNA
gccaggtaagtatgggactcgaaggccttcatc

SEQ ID NO: 209 - DNA, 33 bp, synthetic construct
  misc_feature 1..33: note = Description of sequence: bifunctional oligonucleotide
  source 1..33: mol_type = other DNA
  modified_base 1: mod_base = gm
  modified_base 2: mod_base = cm
  modified_base 3: mod_base = cm
  modified_base 4: mod_base = OTHER; note = 2'O-methyl-adenosine
  modified_base 5: mod_base = gm
  modified_base 6: mod_base = gm
  modified_base 7: mod_base = um
  modified_base 8: mod_base = OTHER; note = 2'O-methyl-adenosine
  modified_base 9: mod_base = OTHER; note = 2'O-methyl-adenosine
  modified_base 10: mod_base = gm
  modified_base 11: mod_base = um
  modified_base 12: mod_base = OTHER; note = 2'O-methyl-adenosine
  modified_base 13: mod_base = um
  modified_base 14: mod_base = OTHER; note = 2'O-methyl-adenosine
  modified_base 15: mod_base = gm
  modified_base 16: mod_base = OTHER; note = locked nucleic acid
  modified_base 17: mod_base = gm
  modified_base 18: mod_base = OTHER; note = 2'O-methyl-adenosine
  modified_base 19: mod_base = cm
  modified_base 20: mod_base = OTHER; note = locked nucleic acid
  modified_base 21: mod_base = cm
  modified_base 22: mod_base = gm
  modified_base 23: mod_base = OTHER; note = 2'O-methyl-adenosine
  modified_base 24: mod_base = OTHER; note = locked nucleic acid
  modified_base 25: mod_base = gm
  modified_base 26: mod_base = gm
  modified_base 27: mod_base = cm
  modified_base 28: mod_base = OTHER; note = locked nucleic acid
  modified_base 29: mod_base = um
  modified_base 30: mod_base = um
  modified_base 31: mod_base = cm
  modified_base 32: mod_base = OTHER; note = locked nucleic acid
  modified_base 33: mod_base = um
  misc_feature 1..19: note = At this position backbone is RNA
  misc_feature 21..33: note = At this position backbone is RNA
gccaggtaagtatagggactcgaaggccttcat

SEQ ID NO: 210 - RNA, 33 nt, synthetic construct
  misc_feature 1..33: note = Description of sequence: bifunctional oligonucleotide
  source 1..33: mol_type = other RNA
  modified_base 1: mod_base = gm
  modified_base 2: mod_base = cm
  modified_base 3: mod_base = cm
  modified_base 4: mod_base = OTHER; note = 2'O-methyl-adenosine
  modified_base 5: mod_base = gm
  modified_base 6: mod_base = gm
  modified_base 7: mod_base = um
  modified_base 8: mod_base = OTHER; note = 2'O-methyl-adenosine
  modified_base 9: mod_base = OTHER; note = 2'O-methyl-adenosine
  modified_base 10: mod_base = gm
  modified_base 11: mod_base = um
  modified_base 12: mod_base = OTHER; note = 2'O-methyl-adenosine
  modified_base 13: mod_base = um
  modified_base 14: mod_base = gm
  modified_base 15: mod_base = OTHER; note = 2'O-methyl-adenosine
  modified_base 16: mod_base = OTHER; note = locked nucleic acid
  modified_base 17: mod_base = gm
  modified_base 18: mod_base = gm
  modified_base 19: mod_base = OTHER; note = 2'O-methyl-adenosine
  modified_base 20: mod_base = OTHER; note = locked nucleic acid
  modified_base 21: mod_base = um
  modified_base 22: mod_base = cm
  modified_base 23: mod_base = gm
  modified_base 24: mod_base = OTHER; note = locked nucleic acid
  modified_base 25: mod_base = OTHER; note = 2'O-methyl-adenosine
  modified_base 26: mod_base = gm
  modified_base 27: mod_base = gm
  modified_base 28: mod_base = OTHER; note = locked nucleic acid
  modified_base 29: mod_base = cm
  modified_base 30: mod_base = um
  modified_base 31: mod_base = um
  modified_base 32: mod_base = OTHER; note = locked nucleic acid
  modified_base 33: mod_base = OTHER; note = 2'O-methyl-adenosine
gccaggtaagtatgagggactcgaaggccttca

SEQ ID NO: 211 - DNA, 33 bp, synthetic construct
  misc_feature 1..33: note = Description of sequence: bifunctional oligonucleotide
  source 1..33: mol_type = other DNA
  modified_base 1: mod_base = gm
  modified_base 2: mod_base = cm
  modified_base 3: mod_base = cm
  modified_base 4: mod_base = OTHER; note = 2'O-methyl-adenosine
  modified_base 5: mod_base = gm
  modified_base 6: mod_base = gm
  modified_base 7: mod_base = um
  modified_base 8: mod_base = OTHER; note = 2'O-methyl-adenosine
  modified_base 9: mod_base = OTHER; note = 2'O-methyl-adenosine
  modified_base 10: mod_base = gm
  modified_base 11: mod_base = um
  modified_base 12: mod_base = OTHER; note = 2'O-methyl-adenosine
  modified_base 13: mod_base = um
  modified_base 14: mod_base = um
  modified_base 15: mod_base = gm
  modified_base 16: mod_base = OTHER; note = locked nucleic acid
  modified_base 17: mod_base = gm
  modified_base 18: mod_base = gm
  modified_base 19: mod_base = gm
  modified_base 20: mod_base = OTHER; note = locked nucleic acid
  modified_base 21: mod_base = cm
  modified_base 22: mod_base = um
  modified_base 23: mod_base = cm
  modified_base 24: mod_base = OTHER; note = locked nucleic acid
  modified_base 25: mod_base = OTHER; note = 2'O-methyl-adenosine
  modified_base 26: mod_base = OTHER; note = 2'O-methyl-adenosine
  modified_base 27: mod_base = gm
  modified_base 28: mod_base = OTHER; note = locked nucleic acid
  modified_base 29: mod_base = cm
  modified_base 30: mod_base = cm
  modified_base 31: mod_base = um
  modified_base 32: mod_base = OTHER; note = locked nucleic acid
  modified_base 33: mod_base = cm
  misc_feature 1..31: note = At this position backbone is RNA
  misc_feature 33: note = At this position backbone is RNA
gccaggtaagtattgagggactcgaaggccttc

SEQ ID NO: 212 - DNA, 33 bp, synthetic construct
  misc_feature 1..33: note = Description of sequence: bifunctional oligonucleotide
  source 1..33: mol_type = other DNA
  modified_base 1: mod_base = gm
  modified_base 2: mod_base = cm
  modified_base 3: mod_base = cm
  modified_base 4: mod_base = OTHER; note = 2'O-methyl-adenosine
  modified_base 5: mod_base = gm
  modified_base 6: mod_base = gm
  modified_base 7: mod_base = um
  modified_base 8: mod_base = OTHER; note = 2'O-methyl-adenosine
  modified_base 9: mod_base = OTHER; note = 2'O-methyl-adenosine
  modified_base 10: mod_base = gm
  modified_base 11: mod_base = um
  modified_base 12: mod_base = OTHER; note = 2'O-methyl-adenosine
  modified_base 13: mod_base = um
  modified_base 14: mod_base = um
  modified_base 15: mod_base = um
  modified_base 16: mod_base = OTHER; note = locked nucleic acid
  modified_base 17: mod_base = OTHER; note = 2'O-methyl-adenosine
  modified_base 18: mod_base = gm
  modified_base 19: mod_base = gm
  modified_base 20: mod_base = OTHER; note = locked nucleic acid
  modified_base 21: mod_base = OTHER; note = 2'O-methyl-adenosine
  modified_base 22: mod_base = cm
  modified_base 23: mod_base = um
  modified_base 24: mod_base = OTHER; note = locked nucleic acid
  modified_base 25: mod_base = gm
  modified_base 26: mod_base = OTHER; note = 2'O-methyl-adenosine
  modified_base 27: mod_base = OTHER; note = 2'O-methyl-adenosine
  modified_base 28: mod_base = OTHER; note = locked nucleic acid
  modified_base 29: mod_base = gm
  modified_base 30: mod_base = cm
  modified_base 31: mod_base = cm
  modified_base 32: mod_base = OTHER; note = locked nucleic acid
  modified_base 33: mod_base = um
  misc_feature 1..31: note = At this position backbone is RNA
  misc_feature 33: note = At this position backbone is RNA
gccaggtaagtatttgagggactcgaaggcctt

SEQ ID NO: 213 - DNA, 33 bp, synthetic construct
  misc_feature 1..33: note = Description of sequence: bifunctional oligonucleotide
  source 1..33: mol_type = other DNA
  modified_base 1: mod_base = gm
  modified_base 2: mod_base = cm
  modified_base 3: mod_base = cm
  modified_base 4: mod_base = OTHER; note = 2'O-methyl-adenosine
  modified_base 5: mod_base = gm
  modified_base 6: mod_base = gm
  modified_base 7: mod_base = um
  modified_base 8: mod_base = OTHER; note = 2'O-methyl-adenosine
  modified_base 9: mod_base = OTHER; note = 2'O-methyl-adenosine
  modified_base 10: mod_base = gm
  modified_base 11: mod_base = um
  modified_base 12: mod_base = OTHER; note = 2'O-methyl-adenosine
  modified_base 13: mod_base = um
  modified_base 14: mod_base = cm
  modified_base 15: mod_base = um
  modified_base 16: mod_base = OTHER; note = locked nucleic acid
  modified_base 17: mod_base = gm
  modified_base 18: mod_base = OTHER; note = 2'O-methyl-adenosine
  modified_base 19: mod_base = gm
  modified_base 20: mod_base = OTHER; note = locked nucleic acid
  modified_base 21: mod_base = gm
  modified_base 22: mod_base = OTHER; note = 2'O-methyl-adenosine
  modified_base 23: mod_base = cm
  modified_base 24: mod_base = OTHER; note = locked nucleic acid
  modified_base 25: mod_base = cm
  modified_base 26: mod_base = gm
  modified_base 27: mod_base = OTHER; note = 2'O-methyl-adenosine
  modified_base 28: mod_base = OTHER; note = locked nucleic acid
  modified_base 29: mod_base = gm
  modified_base 30: mod_base = gm
  modified_base 31: mod_base = cm
  modified_base 32: mod_base = OTHER; note = locked nucleic acid
  modified_base 33: mod_base = um
  misc_feature 1..15: note = At this position backbone is RNA
  misc_feature 17..23: note = At this position backbone is RNA
  misc_feature 25..33: note = At this position backbone is RNA
gccaggtaagtatcttgagggactcgaaggcct

SEQ ID NO: 214 - DNA, 33 bp, synthetic construct
  misc_feature 1..33: note = Description of sequence: bifunctional oligonucleotide
  source 1..33: mol_type = other DNA
  modified_base 1: mod_base = gm
  modified_base 2: mod_base = cm
  modified_base 3: mod_base = cm
  modified_base 4: mod_base = OTHER; note = 2'O-methyl-adenosine
  modified_base 5: mod_base = gm
  modified_base 6: mod_base = gm
  modified_base 7: mod_base = um
  modified_base 8: mod_base = OTHER; note = 2'O-methyl-adenosine
  modified_base 9: mod_base = OTHER; note = 2'O-methyl-adenosine
  modified_base 10: mod_base = gm
  modified_base 11: mod_base = um
  modified_base 12: mod_base = OTHER; note = 2'O-methyl-adenosine
  modified_base 13: mod_base = um
  modified_base 14: mod_base = OTHER; note = 2'O-methyl-adenosine
  modified_base 15: mod_base = cm
  modified_base 16: mod_base = OTHER; note = locked nucleic acid
  modified_base 17: mod_base = um
  modified_base 18: mod_base = gm
  modified_base 19: mod_base = OTHER; note = 2'O-methyl-adenosine
  modified_base 20: mod_base = OTHER; note = locked nucleic acid
  modified_base 21: mod_base = gm
  modified_base 22: mod_base = gm
  modified_base 23: mod_base = OTHER; note = 2'O-methyl-adenosine
  modified_base 24: mod_base = OTHER; note = locked nucleic acid
  modified_base 25: mod_base = um
  modified_base 26: mod_base = cm
  modified_base 27: mod_base = gm
  modified_base 28: mod_base = OTHER; note = locked nucleic acid
  modified_base 29: mod_base = OTHER; note = 2'O-methyl-adenosine
  modified_base 30: mod_base = gm
  modified_base 31: mod_base = gm
  modified_base 32: mod_base = OTHER; note = locked nucleic acid
  modified_base 33: mod_base = cm
  misc_feature 1..15: note = At this position backbone is RNA
  misc_feature 17..33: note = At this position backbone is RNA
gccaggtaagtatacttgagggactcgaaggcc

SEQ ID NO: 215 - RNA, 33 nt, synthetic construct
  misc_feature 1..33: note = Description of sequence: bifunctional oligonucleotide
  source 1..33: mol_type = other RNA
  modified_base 1: mod_base = gm
  modified_base 2: mod_base = cm
  modified_base 3: mod_base = cm
  modified_base 4: mod_base = OTHER; note = 2'O-methyl-adenosine
  modified_base 5: mod_base = gm
  modified_base 6: mod_base = gm
  modified_base 7: mod_base = um
  modified_base 8: mod_base = OTHER; note = 2'O-methyl-adenosine
  modified_base 9: mod_base = OTHER; note = 2'O-methyl-adenosine
  modified_base 10: mod_base = gm
  modified_base 11: mod_base = um
  modified_base 12: mod_base = OTHER; note = 2'O-methyl-adenosine
  modified_base 13: mod_base = um
  modified_base 14: mod_base = gm
  modified_base 15: mod_base = OTHER; note = 2'O-methyl-adenosine
  modified_base 16: mod_base = OTHER; note = locked nucleic acid
  modified_base 17: mod_base = um
  modified_base 18: mod_base = um
  modified_base 19: mod_base = gm
  modified_base 20: mod_base = OTHER; note = locked nucleic acid
  modified_base 21: mod_base = gm
  modified_base 22: mod_base = gm
  modified_base 23: mod_base = gm
  modified_base 24: mod_base = OTHER; note = locked nucleic acid
  modified_base 25: mod_base = cm
  modified_base 26: mod_base = um
  modified_base 27: mod_base = cm
  modified_base 28: mod_base = OTHER; note = locked nucleic acid
  modified_base 29: mod_base = OTHER; note = 2'O-methyl-adenosine
  modified_base 30: mod_base = OTHER; note = 2'O-methyl-adenosine
  modified_base 31: mod_base = gm
  modified_base 32: mod_base = OTHER; note = locked nucleic acid
  modified_base 33: mod_base = cm
gccaggtaagtatgacttgagggactcgaaggc

SEQ ID NO: 216 - RNA, 33 nt, synthetic construct
  misc_feature 1..33: note = Description of sequence: bifunctional oligonucleotide
  source 1..33: mol_type = other RNA
  modified_base 1: mod_base = gm
  modified_base 2: mod_base = cm
  modified_base 3: mod_base = cm
  modified_base 4: mod_base = OTHER; note = 2'O-methyl-adenosine
  modified_base 5: mod_base = gm
  modified_base 6: mod_base = gm
  modified_base 7: mod_base = um
  modified_base 8: mod_base = OTHER; note = 2'O-methyl-adenosine
  modified_base 9: mod_base = OTHER; note = 2'O-methyl-adenosine
  modified_base 10: mod_base = gm
  modified_base 11: mod_base = um
  modified_base 12: mod_base = OTHER; note = 2'O-methyl-adenosine
  modified_base 13: mod_base = um
  modified_base 14: mod_base = gm
  modified_base 15: mod_base = gm
  modified_base 16: mod_base = OTHER; note = locked nucleic acid
  modified_base 17: mod_base = cm
  modified_base 18: mod_base = um
  modified_base 19: mod_base = um
  modified_base 20: mod_base = OTHER; note = locked nucleic acid
  modified_base 21: mod_base = OTHER; note = 2'O-methyl-adenosine
  modified_base 22: mod_base = gm
  modified_base 23: mod_base = gm
  modified_base 24: mod_base = OTHER; note = locked nucleic acid
  modified_base 25: mod_base = OTHER; note = 2'O-methyl-adenosine
  modified_base 26: mod_base = cm
  modified_base 27: mod_base = um
  modified_base 28: mod_base = OTHER; note = locked nucleic acid
  modified_base 29: mod_base = gm
  modified_base 30: mod_base = OTHER; note = 2'O-methyl-adenosine
  modified_base 31: mod_base = OTHER; note = 2'O-methyl-adenosine
  modified_base 32: mod_base = OTHER; note = locked nucleic acid
  modified_base 33: mod_base = gm
gccaggtaagtatggacttgagggactcgaagg

SEQ ID NO: 217 - DNA, 33 bp, synthetic construct
  misc_feature 1..33: note = Description of sequence: bifunctional oligonucleotide
  source 1..33: mol_type = other DNA
  modified_base 1: mod_base = gm
  modified_base 2: mod_base = cm
  modified_base 3: mod_base = cm
  modified_base 4: mod_base = OTHER; note = 2'O-methyl-adenosine
  modified_base 5: mod_base = gm
  modified_base 6: mod_base = gm
  modified_base 7: mod_base = um
  modified_base 8: mod_base = OTHER; note = 2'O-methyl-adenosine
  modified_base 9: mod_base = OTHER; note = 2'O-methyl-adenosine
  modified_base 10: mod_base = gm
  modified_base 11: mod_base = um
  modified_base 12: mod_base = OTHER; note = 2'O-methyl-adenosine
  modified_base 13: mod_base = um
  modified_base 14: mod_base = OTHER; note = 2'O-methyl-adenosine
  modified_base 15: mod_base = gm
  modified_base 16: mod_base = OTHER; note = locked nucleic acid
  modified_base 17: mod_base = OTHER; note = 2'O-methyl-adenosine
  modified_base 18: mod_base = cm
  modified_base 19: mod_base = um
  modified_base 20: mod_base = OTHER; note = locked nucleic acid
  modified_base 21: mod_base = gm
  modified_base 22: mod_base = OTHER; note = 2'O-methyl-adenosine
  modified_base 23: mod_base = gm
  modified_base 24: mod_base = OTHER; note = locked nucleic acid
  modified_base 25: mod_base = gm
  modified_base 26: mod_base = OTHER; note = 2'O-methyl-adenosine
  modified_base 27: mod_base = cm
  modified_base 28: mod_base = OTHER; note = locked nucleic acid
  modified_base 29: mod_base = cm
  modified_base 30: mod_base = gm
  modified_base 31: mod_base = OTHER; note = 2'O-methyl-adenosine
  modified_base 32: mod_base = OTHER; note = locked nucleic acid
  modified_base 33: mod_base = gm
  misc_feature 1..19: note = At this position backbone is RNA
  misc_feature 21..27: note = At this position backbone is RNA
  misc_feature 29..33: note = At this position backbone is RNA
gccaggtaagtataggacttgagggactcgaag

SEQ ID NO: 218 - DNA, 33 bp, synthetic construct
  misc_feature 1..33: note = Description of sequence: bifunctional oligonucleotide
  source 1..33: mol_type = other DNA
  modified_base 1: mod_base = gm
  modified_base 2: mod_base = cm
  modified_base 3: mod_base = cm
  modified_base 4: mod_base = OTHER; note = 2'O-methyl-adenosine
  modified_base 5: mod_base = gm
  modified_base 6: mod_base = gm
  modified_base 7: mod_base = um
  modified_base 8: mod_base = OTHER; note = 2'O-methyl-adenosine
  modified_base 9: mod_base = OTHER; note = 2'O-methyl-adenosine
  modified_base 10: mod_base = gm
  modified_base 11: mod_base = um
  modified_base 12: mod_base = OTHER; note = 2'O-methyl-adenosine
  modified_base 13: mod_base = um
  modified_base 14: mod_base = OTHER; note = 2'O-methyl-adenosine
  modified_base 15: mod_base = OTHER; note = 2'O-methyl-adenosine
  modified_base 16: mod_base = OTHER; note = locked nucleic acid
  modified_base 17: mod_base = gm
  modified_base 18: mod_base = OTHER; note = 2'O-methyl-adenosine
  modified_base 19: mod_base = cm
  modified_base 20: mod_base = OTHER; note = locked nucleic acid
  modified_base 21: mod_base = um
  modified_base 22: mod_base = gm
  modified_base 23: mod_base = OTHER; note = 2'O-methyl-adenosine
  modified_base 24: mod_base = OTHER; note = locked nucleic acid
  modified_base 25: mod_base = gm
  modified_base 26: mod_base = gm
  modified_base 27: mod_base = OTHER; note = 2'O-methyl-adenosine
  modified_base 28: mod_base = OTHER; note = locked nucleic acid
  modified_base 29: mod_base = um
  modified_base 30: mod_base = cm
  modified_base 31: mod_base = gm
  modified_base 32: mod_base = OTHER; note = locked nucleic acid
  modified_base 33: mod_base = OTHER; note = 2'O-methyl-adenosine
  misc_feature 1..19: note = At this position backbone is RNA
  misc_feature 21..33: note = At this position backbone is RNA
gccaggtaagtataaggacttgagggactcgaa

SEQ ID NO: 219 - RNA, 33 nt, synthetic construct
  misc_feature 1..33: note = Description of sequence: bifunctional oligonucleotide
  source 1..33: mol_type = other RNA
  modified_base 1: mod_base = gm
  modified_base 2: mod_base = cm
  modified_base 3: mod_base = cm
  modified_base 4: mod_base = OTHER; note = 2'O-methyl-adenosine
  modified_base 5: mod_base = gm
  modified_base 6: mod_base = gm
  modified_base 7: mod_base = um
  modified_base 8: mod_base = OTHER; note = 2'O-methyl-adenosine
  modified_base 9: mod_base = OTHER; note = 2'O-methyl-adenosine
  modified_base 10: mod_base = gm
  modified_base 11: mod_base = um
  modified_base 12: mod_base = OTHER; note = 2'O-methyl-adenosine
  modified_base 13: mod_base = um
  modified_base 14: mod_base = gm
  modified_base 15: mod_base = OTHER; note = 2'O-methyl-adenosine
  modified_base 16: mod_base = OTHER; note = locked nucleic acid
  modified_base 17: mod_base = gm
  modified_base 18: mod_base = gm
  modified_base 19: mod_base = OTHER; note = 2'O-methyl-adenosine
  modified_base 20: mod_base = OTHER; note = locked nucleic acid
  modified_base 21: mod_base = um
  modified_base 22: mod_base = um
  modified_base 23: mod_base = gm
  modified_base 24: mod_base = OTHER; note = locked nucleic acid
  modified_base 25: mod_base = gm
  modified_base 26: mod_base = gm
  modified_base 27: mod_base = gm
  modified_base 28: mod_base = OTHER; note = locked nucleic acid
  modified_base 29: mod_base = cm
  modified_base 30: mod_base = um
  modified_base 31: mod_base = cm
  modified_base 32: mod_base = OTHER; note = locked nucleic acid
  modified_base 33: mod_base = OTHER; note = 2'O-methyl-adenosine
gccaggtaagtatgaaggacttgagggactcga

SEQ ID NO: 220 - RNA, 33 nt, synthetic construct
  misc_feature 1..33: note = Description of sequence: bifunctional oligonucleotide
  source 1..33: mol_type = other RNA
  modified_base 1: mod_base = gm
  modified_base 2: mod_base = cm
  modified_base 3: mod_base = cm
  modified_base 4: mod_base = OTHER; note = 2'O-methyl-adenosine
  modified_base 5: mod_base = gm
  modified_base 6: mod_base = gm
  modified_base 7: mod_base = um
  modified_base 8: mod_base = OTHER; note = 2'O-methyl-adenosine
  modified_base 9: mod_base = OTHER; note = 2'O-methyl-adenosine
  modified_base 10: mod_base = gm
  modified_base 11: mod_base = um
  modified_base 12: mod_base = OTHER; note = 2'O-methyl-adenosine
  modified_base 13: mod_base = um
  modified_base 14: mod_base = gm
  modified_base 15: mod_base = gm
  modified_base 16: mod_base = OTHER; note = locked nucleic acid
  modified_base 17: mod_base = OTHER; note = 2'O-methyl-adenosine
  modified_base 18: mod_base = gm
  modified_base 19: mod_base = gm
  modified_base 20: mod_base = OTHER; note = locked nucleic acid
  modified_base 21: mod_base = cm
  modified_base 22: mod_base = um
  modified_base 23: mod_base = um
  modified_base 24: mod_base = OTHER; note = locked nucleic acid
  modified_base 25: mod_base = OTHER; note = 2'O-methyl-adenosine
  modified_base 26: mod_base = gm
  modified_base 27: mod_base = gm
  modified_base 28: mod_base = OTHER; note = locked nucleic acid
  modified_base 29: mod_base = OTHER; note = 2'O-methyl-adenosine
  modified_base 30: mod_base = cm
  modified_base 31: mod_base = um
  modified_base 32: mod_base = OTHER; note = locked nucleic acid
  modified_base 33: mod_base = gm
gccaggtaagtatggaaggacttgagggactcg

SEQ ID NO: 221 - DNA, 33 bp, synthetic construct
  misc_feature 1..33: note = Description of sequence: bifunctional oligonucleotide
  source 1..33: mol_type = other DNA
  modified_base 1: mod_base = gm
  modified_base 2: mod_base = cm
  modified_base 3: mod_base = cm
  modified_base 4: mod_base = OTHER; note = 2'O-methyl-adenosine
  modified_base 5: mod_base = gm
  modified_base 6: mod_base = gm
  modified_base 7: mod_base = um
  modified_base 8: mod_base = OTHER; note = 2'O-methyl-adenosine
  modified_base 9: mod_base = OTHER; note = 2'O-methyl-adenosine
  modified_base 10: mod_base = gm
  modified_base 11: mod_base = um
  modified_base 12: mod_base = OTHER; note = 2'O-methyl-adenosine
  modified_base 13: mod_base = um
  modified_base 14: mod_base = um
  modified_base 15: mod_base = gm
  modified_base 16: mod_base = OTHER; note = locked nucleic acid
  modified_base 17: mod_base = OTHER; note = 2'O-methyl-adenosine
  modified_base 18: mod_base = OTHER; note = 2'O-methyl-adenosine
  modified_base 19: mod_base = gm
  modified_base 20: mod_base = OTHER; note = locked nucleic acid
  modified_base 21: mod_base = OTHER; note = 2'O-methyl-adenosine
  modified_base 22: mod_base = cm
  modified_base 23: mod_base = um
  modified_base 24: mod_base = OTHER; note = locked nucleic acid
  modified_base 25: mod_base = gm
  modified_base 26: mod_base = OTHER; note = 2'O-methyl-adenosine
  modified_base 27: mod_base = gm
  modified_base 28: mod_base = OTHER; note = locked nucleic acid
  modified_base 29: mod_base = gm
  modified_base 30: mod_base = OTHER; note = 2'O-methyl-adenosine
  modified_base 31: mod_base = cm
  modified_base 32: mod_base = OTHER; note = locked nucleic acid
  modified_base 33: mod_base = cm
  misc_feature 1..23: note = At this position backbone is RNA
  misc_feature 25..31: note = At this position backbone is RNA
  misc_feature 33: note = At this position backbone is RNA
gccaggtaagtattggaaggacttgagggactc

SEQ ID NO: 222 - DNA, 33 bp, synthetic construct
  misc_feature 1..33: note = Description of sequence: bifunctional oligonucleotide
  source 1..33: mol_type = other DNA
  modified_base 1: mod_base = gm
  modified_base 2: mod_base = cm
  modified_base 3: mod_base = cm
  modified_base 4: mod_base = OTHER; note = 2'O-methyl-adenosine
  modified_base 5: mod_base = gm
  modified_base 6: mod_base = gm
  modified_base 7: mod_base = um
  modified_base 8: mod_base = OTHER; note = 2'O-methyl-adenosine
  modified_base 9: mod_base = OTHER; note = 2'O-methyl-adenosine
  modified_base 10: mod_base = gm
  modified_base 11: mod_base = um
  modified_base 12: mod_base = OTHER; note = 2'O-methyl-adenosine
  modified_base 13: mod_base = um
  modified_base 14: mod_base = cm
  modified_base 15: mod_base = um
  modified_base 16: mod_base = OTHER; note = locked nucleic acid
  modified_base 17: mod_base = gm
  modified_base 18: mod_base = OTHER; note = 2'O-methyl-adenosine
  modified_base 19: mod_base = OTHER; note = 2'O-methyl-adenosine
  modified_base 20: mod_base = OTHER; note = locked nucleic acid
  modified_base 21: mod_base = gm
  modified_base 22: mod_base = OTHER; note = 2'O-methyl-adenosine
  modified_base 23: mod_base = cm
  modified_base 24: mod_base = OTHER; note = locked nucleic acid
  modified_base 25: mod_base = um
  modified_base 26: mod_base = gm
  modified_base 27: mod_base = OTHER; note = 2'O-methyl-adenosine
  modified_base 28: mod_base = OTHER; note = locked nucleic acid
  modified_base 29: mod_base = gm
  modified_base 30: mod_base = gm
  modified_base 31: mod_base = OTHER; note = 2'O-methyl-adenosine
  modified_base 32: mod_base = OTHER; note = locked nucleic acid
  modified_base 33: mod_base = um
  misc_feature 1..23: note = At this position backbone is RNA
  misc_feature 25..33: note = At this position backbone is RNA
gccaggtaagtatctggaaggacttgagggact

SEQ ID NO: 223 - DNA, 33 bp, synthetic construct
  misc_feature 1..33: note = Description of sequence: bifunctional oligonucleotide
  source 1..33: mol_type = other DNA
  modified_base 1: mod_base = gm
  modified_base 2: mod_base = cm
  modified_base 3: mod_base = cm
  modified_base 4: mod_base = OTHER; note = 2'O-methyl-adenosine
  modified_base 5: mod_base = gm
  modified_base 6: mod_base = gm
  modified_base 7: mod_base = um
  modified_base 8: mod_base = OTHER; note = 2'O-methyl-adenosine
  modified_base 9: mod_base = OTHER; note = 2'O-methyl-adenosine
  modified_base 10: mod_base = gm
  modified_base 11: mod_base = um
  modified_base 12: mod_base = OTHER; note = 2'O-methyl-adenosine
  modified_base 13: mod_base = um
  modified_base 14: mod_base = gm
  modified_base 15: mod_base = cm
  modified_base 16: mod_base = OTHER; note = locked nucleic acid
  modified_base 17: mod_base = gm
  modified_base 18: mod_base = gm
  modified_base 19: mod_base = OTHER; note = 2'O-methyl-adenosine
  modified_base 20: mod_base = OTHER; note = locked nucleic acid
  modified_base 21: mod_base = gm
  modified_base 22: mod_base = gm
  modified_base 23: mod_base = OTHER; note = 2'O-methyl-adenosine
  modified_base 24: mod_base = OTHER; note = locked nucleic acid
  modified_base 25: mod_base = um
  modified_base 26: mod_base = um
  modified_base 27: mod_base = gm
  modified_base 28: mod_base = OTHER; note = locked nucleic acid
  modified_base 29: mod_base = gm
  modified_base 30: mod_base = gm
  modified_base 31: mod_base = gm
  modified_base 32: mod_base = OTHER; note = locked nucleic acid
  modified_base 33: mod_base = cm
  misc_feature 1..15: note = At this position backbone is RNA
  misc_feature 17..33: note = At this position backbone is RNA
gccaggtaagtatgctggaaggacttgagggac

SEQ ID NO: 224 - RNA, 33 nt, synthetic construct
  misc_feature 1..33: note = Description of sequence: bifunctional oligonucleotide
  source 1..33: mol_type = other RNA
  modified_base 1: mod_base = gm
  modified_base 2: mod_base = cm
  modified_base 3: mod_base = cm
  modified_base 4: mod_base = OTHER; note = 2'O-methyl-adenosine
  modified_base 5: mod_base = gm
  modified_base 6: mod_base = gm
  modified_base 7: mod_base = um
  modified_base 8: mod_base = OTHER; note = 2'O-methyl-adenosine
  modified_base 9: mod_base = OTHER; note = 2'O-methyl-adenosine
  modified_base 10: mod_base = gm
  modified_base 11: mod_base = um
  modified_base 12: mod_base = OTHER; note = 2'O-methyl-adenosine
  modified_base 13: mod_base = um
  modified_base 14: mod_base = um
  modified_base 15: mod_base = gm
  modified_base 16: mod_base = OTHER; note = locked nucleic acid
  modified_base 17: mod_base = um
  modified_base 18: mod_base = gm
  modified_base 19: mod_base = gm
  modified_base 20: mod_base = OTHER; note = locked nucleic acid
  modified_base 21: mod_base = OTHER; note = 2'O-methyl-adenosine
  modified_base 22: mod_base = gm
  modified_base 23: mod_base = gm
  modified_base 24: mod_base = OTHER; note = locked nucleic acid
  modified_base 25: mod_base = cm
  modified_base 26: mod_base = um
  modified_base 27: mod_base = um
  modified_base 28: mod_base = OTHER; note = locked nucleic acid
  modified_base 29: mod_base = OTHER; note = 2'O-methyl-adenosine
  modified_base 30: mod_base = gm
  modified_base 31: mod_base = gm
  modified_base 32: mod_base = OTHER; note = locked nucleic acid
  modified_base 33: mod_base = OTHER; note = 2'O-methyl-adenosine
gccaggtaagtattgctggaaggacttgaggga

SEQ ID NO: 225 - DNA, 33 bp, synthetic construct
  misc_feature 1..33: note = Description of sequence: bifunctional oligonucleotide
  source 1..33: mol_type = other DNA
  modified_base 1: mod_base = gm
  modified_base 2: mod_base = cm
  modified_base 3: mod_base = cm
  modified_base 4: mod_base = OTHER; note = 2'O-methyl-adenosine
  modified_base 5: mod_base = gm
  modified_base 6: mod_base = gm
  modified_base 7: mod_base = um
  modified_base 8: mod_base = OTHER; note = 2'O-methyl-adenosine
  modified_base 9: mod_base = OTHER; note = 2'O-methyl-adenosine
  modified_base 10: mod_base = gm
  modified_base 11: mod_base = um
  modified_base 12: mod_base = OTHER; note = 2'O-methyl-adenosine
  modified_base 13: mod_base = um
  modified_base 14: mod_base = cm
  modified_base 15: mod_base = um
  modified_base 16: mod_base = OTHER; note = locked nucleic acid
  modified_base 17: mod_base = cm
  modified_base 18: mod_base = um
  modified_base 19: mod_base = gm
  modified_base 20: mod_base = OTHER; note = locked nucleic acid
  modified_base 21: mod_base = OTHER; note = 2'O-methyl-adenosine
  modified_base 22: mod_base = OTHER; note = 2'O-methyl-adenosine
  modified_base 23: mod_base = gm
  modified_base 24: mod_base = OTHER; note = locked nucleic acid
  modified_base 25: mod_base = OTHER; note = 2'O-methyl-adenosine
  modified_base 26: mod_base = cm
  modified_base 27: mod_base = um
  modified_base 28: mod_base = OTHER; note = locked nucleic acid
  modified_base 29: mod_base = gm
  modified_base 30: mod_base = OTHER; note = 2'O-methyl-adenosine
  modified_base 31: mod_base = gm
  modified_base 32: mod_base = OTHER; note = locked nucleic acid
  modified_base 33: mod_base = gm
  misc_feature 1..27: note = At this position backbone is RNA
  misc_feature 29..33: note = At this position backbone is RNA
gccaggtaagtatctgctggaaggacttgaggg

SEQ ID NO: 226 - DNA, 33 bp, synthetic construct
  misc_feature 1..33: note = Description of sequence: bifunctional oligonucleotide
  source 1..33: mol_type = other DNA
  modified_base 1: mod_base = gm
  modified_base 2: mod_base = cm
  modified_base 3: mod_base = cm
  modified_base 4: mod_base = OTHER; note = 2'O-methyl-adenosine
  modified_base 5: mod_base = gm
  modified_base 6: mod_base = gm
  modified_base 7: mod_base = um
  modified_base 8: mod_base = OTHER; note = 2'O-methyl-adenosine
  modified_base 9: mod_base = OTHER; note = 2'O-methyl-adenosine
  modified_base 10: mod_base = gm
  modified_base 11: mod_base = um
  modified_base 12: mod_base = OTHER; note = 2'O-methyl-adenosine
  modified_base 13: mod_base = um
  modified_base 14: mod_base = gm
  modified_base 15: mod_base = cm
  modified_base 16: mod_base = OTHER; note = locked nucleic acid
  modified_base 17: mod_base = gm
  modified_base 18: mod_base = cm
  modified_base 19: mod_base = um
  modified_base 20: mod_base = OTHER; note = locked nucleic acid
  modified_base 21: mod_base = gm
  modified_base 22: mod_base = OTHER; note = 2'O-methyl-adenosine
  modified_base 23: mod_base = OTHER; note = 2'O-methyl-adenosine
  modified_base 24: mod_base = OTHER; note = locked nucleic acid
  modified_base 25: mod_base = gm
  modified_base 26: mod_base = OTHER; note = 2'O-methyl-adenosine
  modified_base 27: mod_base = cm
  modified_base 28: mod_base = OTHER; note = locked nucleic acid
  modified_base 29: mod_base = um
  modified_base 30: mod_base = gm
  modified_base 31: mod_base = OTHER; note = 2'O-methyl-adenosine
  modified_base 32: mod_base = OTHER; note = locked nucleic acid
  modified_base 33: mod_base = gm
  misc_feature 1..15: note = At this position backbone is RNA
  misc_feature 17..27: note = At this position backbone is RNA
  misc_feature 29..33: note = At this position backbone is RNA
gccaggtaagtatgctgctggaaggacttgagg

SEQ ID NO: 227 - DNA, 33 bp, synthetic construct
  misc_feature 1..33: note = Description of sequence: bifunctional oligonucleotide
  source 1..33: mol_type = other DNA
  modified_base 1: mod_base = gm
  modified_base 2: mod_base = cm
  modified_base 3: mod_base = cm
  modified_base 4: mod_base = OTHER; note = 2'O-methyl-adenosine
  modified_base 5: mod_base = gm
  modified_base 6: mod_base = gm
  modified_base 7: mod_base = um
  modified_base 8: mod_base = OTHER; note = 2'O-methyl-adenosine
  modified_base 9: mod_base = OTHER; note = 2'O-methyl-adenosine
  modified_base 10: mod_base = gm
  modified_base 11: mod_base = um
  modified_base 12: mod_base = OTHER; note = 2'O-methyl-adenosine
  modified_base 13: mod_base = um
  modified_base 14: mod_base = um
  modified_base 15: mod_base = gm
  modified_base 16: mod_base = OTHER; note = locked nucleic acid
  modified_base 17: mod_base = um
  modified_base 18: mod_base = gm
  modified_base 19: mod_base = cm
  modified_base 20: mod_base = OTHER; note = locked nucleic acid
  modified_base 21: mod_base = gm
  modified_base 22: mod_base = gm
  modified_base 23: mod_base = OTHER; note = 2'O-methyl-adenosine
  modified_base 24: mod_base = OTHER; note = locked nucleic acid
  modified_base 25: mod_base = gm
  modified_base 26: mod_base = gm
  modified_base 27: mod_base = OTHER; note = 2'O-methyl-adenosine
  modified_base 28: mod_base = OTHER; note = locked nucleic acid
  modified_base 29: mod_base = um
  modified_base 30: mod_base = um
  modified_base 31: mod_base = gm
  modified_base 32: mod_base = OTHER; note = locked nucleic acid
  modified_base 33: mod_base = gm
  misc_feature 1..19: note = At this position backbone is RNA
  misc_feature 21..33: note = At this position backbone is RNA
gccaggtaagtattgctgctggaaggacttgag

SEQ ID NO: 228 - RNA, 33 nt, synthetic construct
  misc_feature 1..33: note = Description of sequence: bifunctional oligonucleotide
  source 1..33: mol_type = other RNA
  modified_base 1: mod_base = gm
  modified_base 2: mod_base = um
  modified_base 3: mod_base = OTHER; note = locked nucleic acid
  modified_base 4: mod_base = cm
  modified_base 5: mod_base = OTHER; note = 2'O-methyl-adenosine
  modified_base 6: mod_base = um
  modified_base 7: mod_base = OTHER; note = locked nucleic acid
  modified_base 8: mod_base = um
  modified_base 9: mod_base = um
  modified_base 10: mod_base = gm
  modified_base 11: mod_base = OTHER; note = locked nucleic acid
  modified_base 12: mod_base = OTHER; note = 2'O-methyl-adenosine
  modified_base 13: mod_base = cm
  modified_base 14: mod_base = cm
  modified_base 15: mod_base = OTHER; note = locked nucleic acid
  modified_base 16: mod_base = gm
  modified_base 17: mod_base = um
  modified_base 18: mod_base = cm
  modified_base 19: mod_base = OTHER; note = locked nucleic acid
  modified_base 20: mod_base = cm
  modified_base 21: mod_base = gm
  modified_base 22: mod_base = cm
  modified_base 23: mod_base = cm
  modified_base 24: mod_base = OTHER; note = 2'O-methyl-adenosine
  modified_base 25: mod_base = gm
  modified_base 26: mod_base = gm
  modified_base 27: mod_base = um
  modified_base 28: mod_base = OTHER; note = 2'O-methyl-adenosine
  modified_base 29: mod_base = OTHER; note = 2'O-methyl-adenosine
  modified_base 30: mod_base = gm
  modified_base 31: mod_base = um
  modified_base 32: mod_base = OTHER; note = 2'O-methyl-adenosine
  modified_base 33: mod_base = um
gtccatcttggacccgtcccgccaggtaagtat

SEQ ID NO: 229 - DNA, 33 bp, synthetic construct
  misc_feature 1..33: note = Description of sequence: bifunctional oligonucleotide
  source 1..33: mol_type = other DNA
  modified_base 1: mod_base = cm
  modified_base 2: mod_base = gm
  modified_base 3: mod_base = OTHER; note = locked nucleic acid
  modified_base 4: mod_base = cm
  modified_base 5: mod_base = cm
  modified_base 6: mod_base = gm
  modified_base 7: mod_base = OTHER; note = locked nucleic acid
  modified_base 8: mod_base = cm
  modified_base 9: mod_base = cm
  modified_base 10: mod_base = OTHER; note = 2'O-methyl-adenosine
  modified_base 11: mod_base = OTHER; note = locked nucleic acid
  modified_base 12: mod_base = cm
  modified_base 13: mod_base = um
  modified_base 14: mod_base = um
  modified_base 15: mod_base = OTHER; note = locked nucleic acid
  modified_base 16: mod_base = gm
  modified_base 17: mod_base = OTHER; note = 2'O-methyl-adenosine
  modified_base 18: mod_base = cm
  modified_base 19: mod_base = OTHER; note = locked nucleic acid
  modified_base 20: mod_base = cm
  modified_base 21: mod_base = gm
  modified_base 22: mod_base = cm
  modified_base 23: mod_base = cm
  modified_base 24: mod_base = OTHER; note = 2'O-methyl-adenosine
  modified_base 25: mod_base = gm
  modified_base 26: mod_base = gm
  modified_base 27: mod_base = um
  modified_base 28: mod_base = OTHER; note = 2'O-methyl-adenosine
  modified_base 29: mod_base = OTHER; note = 2'O-methyl-adenosine
  modified_base 30: mod_base = gm
  modified_base 31: mod_base = um
  modified_base 32: mod_base = OTHER; note = 2'O-methyl-adenosine
  modified_base 33: mod_base = um
  misc_feature 1..6: note = At this position backbone is RNA
  misc_feature 8..10: note = At this position backbone is RNA
  misc_feature 12..33: note = At this position backbone is RNA
cggccgtccatcttggacccgccaggtaagtat

SEQ ID NO: 230 - DNA, 33 bp, synthetic construct
  misc_feature 1..33: note = Description of sequence: bifunctional oligonucleotide
  source 1..33: mol_type = other DNA
  modified_base 1: mod_base = cm
  modified_base 2: mod_base = um
  modified_base 3: mod_base = OTHER; note = locked nucleic acid
  modified_base 4: mod_base = OTHER; note = 2'O-methyl-adenosine
  modified_base 5: mod_base = gm
  modified_base 6: mod_base = cm
  modified_base 7: mod_base = OTHER; note = locked nucleic acid
  modified_base 8: mod_base = gm
  modified_base 9: mod_base = cm
  modified_base 10: mod_base = cm
  modified_base 11: mod_base = OTHER; note = locked nucleic acid
  modified_base 12: mod_base = um
  modified_base 13: mod_base = cm
  modified_base 14: mod_base = cm
  modified_base 15: mod_base = OTHER; note = locked nucleic acid
  modified_base 16: mod_base = um
  modified_base 17: mod_base = cm
  modified_base 18: mod_base = um
  modified_base 19: mod_base = OTHER; note = locked nucleic acid
  modified_base 20: mod_base = gm
  modified_base 21: mod_base = gm
  modified_base 22: mod_base = cm
  modified_base 23: mod_base = cm
  modified_base 24: mod_base = OTHER; note = 2'O-methyl-adenosine
  modified_base 25: mod_base = gm
  modified_base 26: mod_base = gm
  modified_base 27: mod_base = um
  modified_base 28: mod_base = OTHER; note = 2'O-methyl-adenosine
  modified_base 29: mod_base = OTHER; note = 2'O-methyl-adenosine
  modified_base 30: mod_base = gm
  modified_base 31: mod_base = um
  modified_base 32: mod_base = OTHER; note = 2'O-methyl-adenosine
  modified_base 33: mod_base = um
  misc_feature 1..18: note = At this position backbone is RNA
  misc_feature 20..33: note = At this position backbone is RNA
ctgagcggccgtccatcttggccaggtaagtat

SEQ ID NO: 231 - DNA, 33 bp, synthetic construct
  misc_feature 1..33: note = Description of sequence: bifunctional oligonucleotide
  source 1..33: mol_type = other DNA
  modified_base 1: mod_base = OTHER; note = 2'O-methyl-adenosine
  modified_base 2: mod_base = gm
  modified_base 3: mod_base = OTHER; note = locked nucleic acid
  modified_base 4: mod_base = OTHER; note = 2'O-methyl-adenosine
  modified_base 5: mod_base = cm
  modified_base 6: mod_base = cm
  modified_base 7: mod_base = OTHER; note = locked nucleic acid
  modified_base 8: mod_base = gm
  modified_base 9: mod_base = OTHER; note = 2'O-methyl-adenosine
  modified_base 10: mod_base = gm
  modified_base 11: mod_base = OTHER; note = locked nucleic acid
  modified_base 12: mod_base = gm
  modified_base 13: mod_base = gm
  modified_base 14: mod_base = cm
  modified_base 15: mod_base = OTHER; note = locked nucleic acid
  modified_base 16: mod_base = gm
  modified_base 17: mod_base = um
  modified_base 18: mod_base = cm
  modified_base 19: mod_base = OTHER; note = locked nucleic acid
  modified_base 20: mod_base = OTHER; note = 2'O-methyl-adenosine
  modified_base 21: mod_base = gm
  modified_base 22: mod_base = cm
  modified_base 23: mod_base = cm
  modified_base 24: mod_base = OTHER; note = 2'O-methyl-adenosine
  modified_base 25: mod_base = gm
  modified_base 26: mod_base = gm
  modified_base 27: mod_base = um
  modified_base 28: mod_base = OTHER; note = 2'O-methyl-adenosine
  modified_base 29: mod_base = OTHER; note = 2'O-methyl-adenosine
  modified_base 30: mod_base = gm
  modified_base 31: mod_base = um
  modified_base 32: mod_base = OTHER; note = 2'O-methyl-adenosine
  modified_base 33: mod_base = um
  misc_feature 1..6: note = At this position backbone is RNA
  misc_feature 8..33: note = At this position backbone is RNA
agaacctgagcggccgtccagccaggtaagtat

SEQ ID NO: 232 - RNA, 33 nt, synthetic construct
  misc_feature 1..33: note = Description of sequence: bifunctional oligonucleotide
  source 1..33: mol_type = other RNA
  modified_base 1: mod_base = OTHER; note = 2'O-methyl-adenosine
  modified_base 2: mod_base = OTHER; note = 2'O-methyl-adenosine
  modified_base 3: mod_base = OTHER; note = locked nucleic acid
  modified_base 4: mod_base = gm
  modified_base 5: mod_base = cm
  modified_base 6: mod_base = OTHER; note = 2'O-methyl-adenosine
  modified_base 7: mod_base = OTHER; note = locked nucleic acid
  modified_base 8: mod_base = OTHER; note = 2'O-methyl-adenosine
  modified_base 9: mod_base = OTHER; note = 2'O-methyl-adenosine
  modified_base 10: mod_base = cm
  modified_base 11: mod_base = OTHER; note = locked nucleic acid
  modified_base 12: mod_base = um
  modified_base 13: mod_base = gm
  modified_base 14: mod_base = OTHER; note = 2'O-methyl-adenosine
  modified_base 15: mod_base = OTHER; note = locked nucleic acid
  modified_base 16: mod_base = cm
  modified_base 17: mod_base = gm
  modified_base 18: mod_base = gm
  modified_base 19: mod_base = OTHER; note = locked nucleic acid
  modified_base 20: mod_base = cm
  modified_base 21: mod_base = gm
  modified_base 22: mod_base = cm
  modified_base 23: mod_base = cm
  modified_base 24: mod_base = OTHER; note = 2'O-methyl-adenosine
  modified_base 25: mod_base = gm
  modified_base 26: mod_base = gm
  modified_base 27: mod_base = um
  modified_base 28: mod_base = OTHER; note = 2'O-methyl-adenosine
  modified_base 29: mod_base = OTHER; note = 2'O-methyl-adenosine
  modified_base 30: mod_base = gm
  modified_base 31: mod_base = um
  modified_base 32: mod_base = OTHER; note = 2'O-methyl-adenosine
  modified_base 33: mod_base = um
aaagcagaacctgagcggccgccaggtaagtat

SEQ ID NO: 233 - RNA, 33 nt, synthetic construct
  misc_feature 1..33: note = Description of sequence: bifunctional oligonucleotide
  source 1..33: mol_type = other RNA
  modified_base 1: mod_base = OTHER; note = 2'O-methyl-adenosine
  modified_base 2: mod_base = gm
  modified_base 3: mod_base = OTHER; note = locked nucleic acid
  modified_base 4: mod_base = um
  modified_base 5: mod_base = OTHER; note = 2'O-methyl-adenosine
  modified_base 6: mod_base = OTHER; note = 2'O-methyl-adenosine
  modified_base 7: mod_base = OTHER; note = locked nucleic acid
  modified_base 8: mod_base = OTHER; note = 2'O-methyl-adenosine
  modified_base 9: mod_base = gm
  modified_base 10: mod_base = cm
  modified_base 11: mod_base = OTHER; note = locked nucleic acid
  modified_base 12: mod_base = gm
  modified_base 13: mod_base = OTHER; note = 2'O-methyl-adenosine
  modified_base 14: mod_base = OTHER; note = 2'O-methyl-adenosine
  modified_base 15: mod_base = OTHER; note = locked nucleic acid
  modified_base 16: mod_base = cm
  modified_base 17: mod_base = um
  modified_base 18: mod_base = gm
  modified_base 19: mod_base = OTHER; note = locked nucleic acid
  modified_base 20: mod_base = gm
  modified_base 21: mod_base = gm
  modified_base 22: mod_base = cm
  modified_base 23: mod_base = cm
  modified_base 24: mod_base = OTHER; note = 2'O-methyl-adenosine
  modified_base 25: mod_base = gm
  modified_base 26: mod_base = gm
  modified_base 27: mod_base = um
  modified_base 28: mod_base = OTHER; note = 2'O-methyl-adenosine
  modified_base 29: mod_base = OTHER; note = 2'O-methyl-adenosine
  modified_base 30: mod_base = gm
  modified_base 31: mod_base = um
  modified_base 32: mod_base = OTHER; note = 2'O-methyl-adenosine
  modified_base 33: mod_base = um
aggtaaaagcagaacctgaggccaggtaagtat

SEQ ID NO: 234 - RNA, 33 nt, synthetic construct
  misc_feature 1..33: note = Description of sequence: bifunctional oligonucleotide
  source 1..33: mol_type = other RNA
  modified_base 1: mod_base = gm
  modified_base 2: mod_base = cm
  modified_base 3: mod_base = OTHER; note = locked nucleic acid
  modified_base 4: mod_base = gm
  modified_base 5: mod_base = cm
  modified_base 6: mod_base = OTHER; note = 2'O-methyl-adenosine
  modified_base 7: mod_base = OTHER; note = locked nucleic acid
  modified_base 8: mod_base = gm
  modified_base 9: mod_base = um
  modified_base 10: mod_base = OTHER; note = 2'O-methyl-adenosine
  modified_base 11: mod_base = OTHER; note = locked nucleic acid
  modified_base 12: mod_base = OTHER; note = 2'O-methyl-adenosine
  modified_base 13: mod_base = OTHER; note = 2'O-methyl-adenosine
  modified_base 14: mod_base = gm
  modified_base 15: mod_base = OTHER; note = locked nucleic acid
  modified_base 16: mod_base = OTHER; note = 2'O-methyl-adenosine
  modified_base 17: mod_base = gm
  modified_base 18: mod_base = OTHER; note = 2'O-methyl-adenosine
  modified_base 19: mod_base = OTHER; note = locked nucleic acid
  modified_base 20: mod_base = cm
  modified_base 21: mod_base = gm
  modified_base 22: mod_base = cm
  modified_base 23: mod_base = cm
  modified_base 24: mod_base = OTHER; note = 2'O-methyl-adenosine
  modified_base 25: mod_base = gm
  modified_base 26: mod_base = gm
  modified_base 27: mod_base = um
  modified_base 28: mod_base = OTHER; note = 2'O-methyl-adenosine
  modified_base 29: mod_base = OTHER; note = 2'O-methyl-adenosine
  modified_base 30: mod_base = gm
  modified_base 31: mod_base = um
  modified_base 32: mod_base = OTHER; note = 2'O-methyl-adenosine
  modified_base 33: mod_base = um
gccgcaggtaaaagcagaacgccaggtaagtat

SEQ ID NO: 235 - DNA, 33 bp, synthetic construct
  misc_feature 1..33: note = Description of sequence: bifunctional oligonucleotide
  source 1..33: mol_type = other DNA
  modified_base 1: mod_base = um
  modified_base 2: mod_base = cm
  modified_base 3: mod_base = OTHER; note = locked nucleic acid
  modified_base 4: mod_base = gm
  modified_base 5: mod_base = gm
  modified_base 6: mod_base = gm
  modified_base 7: mod_base = OTHER; note = locked nucleic acid
  modified_base 8: mod_base = cm
  modified_base 9: mod_base = gm
  modified_base 10: mod_base = cm
  modified_base 11: mod_base = OTHER; note = locked nucleic acid
  modified_base 12: mod_base = gm
  modified_base 13: mod_base = gm
  modified_base 14: mod_base = um
  modified_base 15: mod_base = OTHER; note = locked nucleic acid
  modified_base 16: mod_base = OTHER; note = 2'O-methyl-adenosine
  modified_base 17: mod_base = OTHER; note = 2'O-methyl-adenosine
  modified_base 18: mod_base = OTHER; note = 2'O-methyl-adenosine
  modified_base 19: mod_base = OTHER; note = locked nucleic acid
  modified_base 20: mod_base = cm
  modified_base 21: mod_base = gm
  modified_base 22: mod_base = cm
  modified_base 23: mod_base = cm
  modified_base 24: mod_base = OTHER; note = 2'O-methyl-adenosine
  modified_base 25: mod_base = gm
  modified_base 26: mod_base = gm
  modified_base 27: mod_base = um
  modified_base 28: mod_base = OTHER; note = 2'O-methyl-adenosine
  modified_base 29: mod_base = OTHER; note = 2'O-methyl-adenosine
  modified_base 30: mod_base = gm
  modified_base 31: mod_base = um
  modified_base 32: mod_base = OTHER; note = 2'O-methyl-adenosine
  modified_base 33: mod_base = um
  misc_feature 1..2: note = At this position backbone is RNA
  misc_feature 4..33: note = At this position backbone is RNA
tctgggccgcaggtaaaagcgccaggtaagtat

SEQ ID NO: 236 - RNA, 33 nt, synthetic construct
  misc_feature 1..33: note = Description of sequence: bifunctional oligonucleotide
  source 1..33: mol_type = other RNA
  modified_base 1: mod_base = um
  modified_base 2: mod_base = cm
  modified_base 3: mod_base = OTHER; note = locked nucleic acid
  modified_base 4: mod_base = cm
  modified_base 5: mod_base = gm
  modified_base 6: mod_base = gm
  modified_base 7: mod_base = OTHER; note = locked nucleic acid
  modified_base 8: mod_base = gm
  modified_base 9: mod_base = cm
  modified_base 10: mod_base = cm
  modified_base 11: mod_base = OTHER; note = locked nucleic acid
  modified_base 12: mod_base = cm
  modified_base 13: mod_base = um
  modified_base 14: mod_base = cm
  modified_base 15: mod_base = OTHER; note = locked nucleic acid
  modified_base 16: mod_base = gm
  modified_base 17: mod_base = cm
  modified_base 18: mod_base = OTHER; note = 2'O-methyl-adenosine
  modified_base 19: mod_base = OTHER; note = locked nucleic acid
  modified_base 20: mod_base = cm
  modified_base 21: mod_base = gm
  modified_base 22: mod_base = cm
  modified_base 23: mod_base = cm
  modified_base 24: mod_base = OTHER; note = 2'O-methyl-adenosine
  modified_base 25: mod_base = gm
  modified_base 26: mod_base = gm
  modified_base 27: mod_base = um
  modified_base 28: mod_base = OTHER; note = 2'O-methyl-adenosine
  modified_base 29: mod_base = OTHER; note = 2'O-methyl-adenosine
  modified_base 30: mod_base = gm
  modified_base 31: mod_base = um
  modified_base 32: mod_base = OTHER; note = 2'O-methyl-adenosine
  modified_base 33: mod_base = um
tcgcggcgccgctcagcaccgccaggtaagtat

SEQ ID NO: 237 - RNA, 33 nt, synthetic construct
  misc_feature 1..33: note = Description of sequence: bifunctional oligonucleotide
  source 1..33: mol_type = other RNA
  modified_base 1: mod_base = cm
  modified_base 2: mod_base = cm
  modified_base 3: mod_base = OTHER; note = locked nucleic acid
  modified_base 4: mod_base = OTHER; note = 2'O-methyl-adenosine
  modified_base 5: mod_base = cm
  modified_base 6: mod_base = um
  modified_base 7: mod_base = OTHER; note = locked nucleic acid
  modified_base 8: mod_base = gm
  modified_base 9: mod_base = cm
  modified_base 10: mod_base = gm
  modified_base 11: mod_base = OTHER; note = locked nucleic acid
  modified_base 12: mod_base = cm
  modified_base 13: mod_base = gm
  modified_base 14: mod_base = cm
  modified_base 15: mod_base = OTHER; note = locked nucleic acid
  modified_base 16: mod_base = gm
  modified_base 17: mod_base = cm
  modified_base 18: mod_base = um
  modified_base 19: mod_base = OTHER; note = locked nucleic acid
  modified_base 20: mod_base = OTHER; note = 2'O-methyl-adenosine
  modified_base 21: mod_base = gm
  modified_base 22: mod_base = cm
  modified_base 23: mod_base = cm
  modified_base 24: mod_base = OTHER; note = 2'O-methyl-adenosine
  modified_base 25: mod_base = gm
  modified_base 26: mod_base = gm
  modified_base 27: mod_base = um
  modified_base 28: mod_base = OTHER; note = 2'O-methyl-adenosine
  modified_base 29: mod_base = OTHER; note = 2'O-methyl-adenosine
  modified_base 30: mod_base = gm
  modified_base 31: mod_base = um
  modified_base 32: mod_base = OTHER; note = 2'O-methyl-adenosine
  modified_base 33: mod_base = um
ccgactcgcggcgccgctcagccaggtaagtat

SEQ ID NO: 238 - RNA, 33 nt, synthetic construct
  misc_feature 1..33: note = Description of sequence: bifunctional oligonucleotide
  source 1..33: mol_type = other RNA
  modified_base 1: mod_base = cm
  modified_base 2: mod_base = cm
  modified_base 3: mod_base = OTHER; note = locked nucleic acid
  modified_base 4: mod_base = gm
  modified_base 5: mod_base = OTHER; note = 2'O-methyl-adenosine
  modified_base 6: mod_base = gm
  modified_base 7: mod_base = OTHER; note = locked nucleic acid
  modified_base 8: mod_base = cm
  modified_base 9: mod_base = cm
  modified_base 10: mod_base = um
  modified_base 11: mod_base = OTHER; note = locked nucleic acid
  modified_base 12: mod_base = gm
  modified_base 13: mod_base = gm
  modified_base 14: mod_base = gm
  modified_base 15: mod_base = OTHER; note = locked nucleic acid
  modified_base 16: mod_base = cm
  modified_base 17: mod_base = gm
  modified_base 18: mod_base = OTHER; note = 2'O-methyl-adenosine
  modified_base 19: mod_base = OTHER; note = locked nucleic acid
  modified_base 20: mod_base = um
  modified_base 21: mod_base = gm
  modified_base 22: mod_base = cm
  modified_base 23: mod_base = cm
  modified_base 24: mod_base = OTHER; note = 2'O-methyl-adenosine
  modified_base 25: mod_base = gm
  modified_base 26: mod_base = gm
  modified_base 27: mod_base = um
  modified_base 28: mod_base = OTHER; note = 2'O-methyl-adenosine
  modified_base 29: mod_base = OTHER; note = 2'O-methyl-adenosine
  modified_base 30: mod_base = gm
  modified_base 31: mod_base = um
  modified_base 32: mod_base = OTHER; note = 2'O-methyl-adenosine
  modified_base 33: mod_base = um
ccggaggcctcgggccgactgccaggtaagtat

SEQ ID NO: 239 - DNA, 33 bp, synthetic construct
  misc_feature 1..33: note = Description of sequence: bifunctional oligonucleotide
  source 1..33: mol_type = other DNA
  modified_base 1: mod_base = cm
  modified_base 2: mod_base = gm
  modified_base 3: mod_base = OTHER; note = locked nucleic acid
  modified_base 4: mod_base = cm
  modified_base 5: mod_base = OTHER; note = 2'O-methyl-adenosine
  modified_base 6: mod_base = gm
  modified_base 7: mod_base = OTHER; note = locked nucleic acid
  modified_base 8: mod_base = cm
  modified_base 9: mod_base = cm
  modified_base 10: mod_base = cm
  modified_base 11: mod_base = OTHER; note = locked nucleic acid
  modified_base 12: mod_base = gm
  modified_base 13: mod_base = gm
  modified_base 14: mod_base = OTHER; note = 2'O-methyl-adenosine
  modified_base 15: mod_base = OTHER; note = locked nucleic acid
  modified_base 16: mod_base = gm
  modified_base 17: mod_base = cm
  modified_base 18: mod_base = cm
  modified_base 19: mod_base = OTHER; note = locked nucleic acid
  modified_base 20: mod_base = cm
  modified_base 21: mod_base = gm
  modified_base 22: mod_base = cm
  modified_base 23: mod_base = cm
  modified_base 24: mod_base = OTHER; note = 2'O-methyl-adenosine
  modified_base 25: mod_base = gm
  modified_base 26: mod_base = gm
  modified_base 27: mod_base = um
  modified_base 28: mod_base = OTHER; note = 2'O-methyl-adenosine
  modified_base 29: mod_base = OTHER; note = 2'O-methyl-adenosine
  modified_base 30: mod_base = gm
  modified_base 31: mod_base = um
  modified_base 32: mod_base = OTHER; note = 2'O-methyl-adenosine
  modified_base 33: mod_base = um
  misc_feature 1..6: note = At this position backbone is RNA
  misc_feature 8..18: note = At this position backbone is RNA
  misc_feature 20..33: note = At this position backbone is RNA
cggcagtccccggaggcctcgccaggtaagtat

SEQ ID NO: 240 - RNA, 33 nt, synthetic construct
  misc_feature 1..33: note = Description of sequence: bifunctional oligonucleotide
  source 1..33: mol_type = other RNA
  modified_base 1: mod_base = cm
  modified_base 2: mod_base = gm
  modified_base 3: mod_base = OTHER; note = locked nucleic acid
  modified_base 4: mod_base = cm
  modified_base 5: mod_base = OTHER; note = 2'O-methyl-adenosine
  modified_base 6: mod_base = cm
  modified_base 7: mod_base = OTHER; note = locked nucleic acid
  modified_base 8: mod_base = gm
  modified_base 9: mod_base = cm
  modified_base 10: mod_base = OTHER; note = 2'O-methyl-adenosine
  modified_base 11: mod_base = OTHER; note = locked nucleic acid
  modified_base 12: mod_base = um
  modified_base 13: mod_base = cm
  modified_base 14: mod_base = cm
  modified_base 15: mod_base = OTHER; note = locked nucleic acid
  modified_base 16: mod_base = cm
  modified_base 17: mod_base = gm
  modified_base 18: mod_base = gm
  modified_base 19: mod_base = OTHER; note = locked nucleic acid
  modified_base 20: mod_base = gm
  modified_base 21: mod_base = gm
  modified_base 22: mod_base = cm
  modified_base 23: mod_base = cm
  modified_base 24: mod_base = OTHER; note = 2'O-methyl-adenosine
  modified_base 25: mod_base = gm
  modified_base 26: mod_base = gm
  modified_base 27: mod_base = um
  modified_base 28: mod_base = OTHER; note = 2'O-methyl-adenosine
  modified_base 29: mod_base = OTHER; note = 2'O-methyl-adenosine
  modified_base 30: mod_base = gm
  modified_base 31: mod_base = um
  modified_base 32: mod_base = OTHER; note = 2'O-methyl-adenosine
  modified_base 33: mod_base = um
cggcacggcagtccccggaggccaggtaagtat

SEQ ID NO: 241 - RNA, 33 nt, synthetic construct
  misc_feature 1..33: note = Description of sequence: bifunctional oligonucleotide
  source 1..33: mol_type = other RNA
  modified_base 1: mod_base = gm
  modified_base 2: mod_base = um
  modified_base 3: mod_base = OTHER; note = locked nucleic acid
  modified_base 4: mod_base = um
  modified_base 5: mod_base = cm
  modified_base 6: mod_base = cm
  modified_base 7: mod_base = OTHER; note = locked nucleic acid
  modified_base 8: mod_base = gm
  modified_base 9: mod_base = cm
  modified_base 10: mod_base = cm
  modified_base 11: mod_base = OTHER; note = locked nucleic acid
  modified_base 12: mod_base = gm
  modified_base 13: mod_base = gm
  modified_base 14: mod_base = cm
  modified_base 15: mod_base = OTHER; note = locked nucleic acid
  modified_base 16: mod_base = cm
  modified_base 17: mod_base = gm
  modified_base 18: mod_base = gm
  modified_base 19: mod_base = OTHER; note = locked nucleic acid
  modified_base 20: mod_base = OTHER; note = 2'O-methyl-adenosine
  modified_base 21: mod_base = gm
  modified_base 22: mod_base = cm
  modified_base 23: mod_base = cm
  modified_base 24: mod_base = OTHER; note = 2'O-methyl-adenosine
  modified_base 25: mod_base = gm
  modified_base 26: mod_base = gm
  modified_base 27: mod_base = um
  modified_base 28: mod_base = OTHER; note = 2'O-methyl-adenosine
  modified_base 29: mod_base = OTHER; note = 2'O-methyl-adenosine
  modified_base 30: mod_base = gm
  modified_base 31: mod_base = um
  modified_base 32: mod_base = OTHER; note = 2'O-methyl-adenosine
  modified_base 33: mod_base = um
gtctcccgcccggcacggcagccaggtaagtat

SEQ ID NO: 242 - DNA, 33 bp, synthetic construct
  misc_feature 1..33: note = Description of sequence: bifunctional oligonucleotide
  source 1..33: mol_type = other DNA
  modified_base 1: mod_base = gm
  modified_base 2: mod_base = cm
  modified_base 3: mod_base = OTHER; note = locked nucleic acid
  modified_base 4: mod_base = OTHER; note = 2'O-methyl-adenosine
  modified_base 5: mod_base = um
  modified_base 6: mod_base = gm
  modified_base 7: mod_base = OTHER; note = locked nucleic acid
  modified_base 8: mod_base = cm
  modified_base 9: mod_base = gm
  modified_base 10: mod_base = gm
  modified_base 11: mod_base = OTHER; note = locked nucleic acid
  modified_base 12: mod_base = cm
  modified_base 13: mod_base = um
  modified_base 14: mod_base = cm
  modified_base 15: mod_base = OTHER; note = locked nucleic acid
  modified_base 16: mod_base = cm
  modified_base 17: mod_base = gm
  modified_base 18: mod_base = cm
  modified_base 19: mod_base = OTHER; note = locked nucleic acid
  modified_base 20: mod_base = cm
  modified_base 21: mod_base = gm
  modified_base 22: mod_base = cm
  modified_base 23: mod_base = cm
  modified_base 24: mod_base = OTHER; note = 2'O-methyl-adenosine
  modified_base 25: mod_base = gm
  modified_base 26: mod_base = gm
  modified_base 27: mod_base = um
  modified_base 28: mod_base = OTHER; note = 2'O-methyl-adenosine
  modified_base 29: mod_base = OTHER; note = 2'O-methyl-adenosine
  modified_base 30: mod_base = gm
  modified_base 31: mod_base = um
  modified_base 32: mod_base = OTHER; note = 2'O-methyl-adenosine
  modified_base 33: mod_base = um
  misc_feature 1..10: note = At this position backbone is RNA
  misc_feature 12..33: note = At this position backbone is RNA
gccatggcggtctcccgcccgccaggtaagtat

SEQ ID NO: 243 - RNA, 33 nt, synthetic construct
  misc_feature 1..33: note = Description of sequence: bifunctional oligonucleotide
  source 1..33: mol_type = other RNA
  modified_base 1: mod_base = gm
  modified_base 2: mod_base = gm
  modified_base 3: mod_base = OTHER; note = locked nucleic acid
  modified_base 4: mod_base = um
  modified_base 5: mod_base = cm
  modified_base 6: mod_base = gm
  modified_base 7: mod_base = OTHER; note = locked nucleic acid
  modified_base 8: mod_base = cm
  modified_base 9: mod_base = OTHER; note = 2'O-methyl-adenosine
  modified_base 10: mod_base = um
  modified_base 11: mod_base = OTHER; note = locked nucleic acid
  modified_base 12: mod_base = gm
  modified_base 13: mod_base = cm
  modified_base 14: mod_base = gm
  modified_base 15: mod_base = OTHER; note = locked nucleic acid
  modified_base 16: mod_base = um
  modified_base 17: mod_base = cm
  modified_base 18: mod_base = um
  modified_base 19: mod_base = OTHER; note = locked nucleic acid
  modified_base 20: mod_base = cm
  modified_base 21: mod_base = gm
  modified_base 22: mod_base = cm
  modified_base 23: mod_base = cm
  modified_base 24: mod_base = OTHER; note = 2'O-methyl-adenosine
  modified_base 25: mod_base = gm
  modified_base 26: mod_base = gm
  modified_base 27: mod_base = um
  modified_base 28: mod_base = OTHER; note = 2'O-methyl-adenosine
  modified_base 29: mod_base = OTHER; note = 2'O-methyl-adenosine
  modified_base 30: mod_base = gm
  modified_base 31: mod_base = um
  modified_base 32: mod_base = OTHER; note = 2'O-methyl-adenosine
  modified_base 33: mod_base = um
gggtcgccatggcggtctccgccaggtaagtat

SEQ ID NO: 244 - DNA, 33 bp, synthetic construct
  misc_feature 1..33: note = Description of sequence: bifunctional oligonucleotide
  source 1..33: mol_type = other DNA
  modified_base 1: mod_base = um
  modified_base 2: mod_base = um
  modified_base 3: mod_base = OTHER; note = locked nucleic acid
  modified_base 4: mod_base = cm
  modified_base 5: mod_base = OTHER; note = 2'O-methyl-adenosine
  modified_base 6: mod_base = gm
  modified_base 7: mod_base = OTHER; note = locked nucleic acid
  modified_base 8: mod_base = gm
  modified_base 9: mod_base = um
  modified_base 10: mod_base = cm
  modified_base 11: mod_base = OTHER; note = locked nucleic acid
  modified_base 12: mod_base = cm
  modified_base 13: mod_base = cm
  modified_base 14: mod_base = OTHER; note = 2'O-methyl-adenosine
  modified_base 15: mod_base = OTHER; note = locked nucleic acid
  modified_base 16: mod_base = gm
  modified_base 17: mod_base = gm
  modified_base 18: mod_base = cm
  modified_base 19: mod_base = OTHER; note = locked nucleic acid
  modified_base 20: mod_base = gm
  modified_base 21: mod_base = gm
  modified_base 22: mod_base = cm
  modified_base 23: mod_base = cm
  modified_base 24: mod_base = OTHER; note = 2'O-methyl-adenosine
  modified_base 25: mod_base = gm
  modified_base 26: mod_base = gm
  modified_base 27: mod_base = um
  modified_base 28: mod_base = OTHER; note = 2'O-methyl-adenosine
  modified_base 29: mod_base = OTHER; note = 2'O-methyl-adenosine
  modified_base 30: mod_base = gm
  modified_base 31: mod_base = um
  modified_base 32: mod_base = OTHER; note = 2'O-methyl-adenosine
  modified_base 33: mod_base = um
  misc_feature 1..14: note = At this position backbone is RNA
  misc_feature 16..33: note = At this position backbone is RNA
ttccagggtcgccatggcgggccaggtaagtat

SEQ ID NO: 245 - DNA, 33 bp, synthetic construct
  misc_feature 1..33: note = Description of sequence: bifunctional oligonucleotide
  source 1..33: mol_type = other DNA
  modified_base 1: mod_base = OTHER; note = 2'O-methyl-adenosine
  modified_base 2: mod_base = gm
  modified_base 3: mod_base = OTHER; note = locked nucleic acid
  modified_base 4: mod_base = um
  modified_base 5: mod_base = um
  modified_base 6: mod_base = um
  modified_base 7: mod_base = OTHER; note = locked nucleic acid
  modified_base 8: mod_base = cm
  modified_base 9: mod_base = cm
  modified_base 10: mod_base = OTHER; note = 2'O-methyl-adenosine
  modified_base 11: mod_base = OTHER; note = locked nucleic acid
  modified_base 12: mod_base = gm
  modified_base 13: mod_base = gm
  modified_base 14: mod_base = um
  modified_base 15: mod_base = OTHER; note = locked nucleic acid
  modified_base 16: mod_base = gm
  modified_base 17: mod_base = cm
  modified_base 18: mod_base = cm
  modified_base 19: mod_base = OTHER; note = locked nucleic acid
  modified_base 20: mod_base = um
  modified_base 21: mod_base = gm
  modified_base 22: mod_base = cm
  modified_base 23: mod_base = cm
  modified_base 24: mod_base = OTHER; note = 2'O-methyl-adenosine
  modified_base 25: mod_base = gm
  modified_base 26: mod_base = gm
  modified_base 27: mod_base = um
  modified_base 28: mod_base = OTHER; note = 2'O-methyl-adenosine
  modified_base 29: mod_base = OTHER; note = 2'O-methyl-adenosine
  modified_base 30: mod_base = gm
  modified_base 31: mod_base = um
  modified_base 32: mod_base = OTHER; note = 2'O-methyl-adenosine
  modified_base 33: mod_base = um
  misc_feature 1..6: note = At this position backbone is RNA
  misc_feature 8..33: note = At this position backbone is RNA
agcttttccagggtcgccatgccaggtaagtat

SEQ ID NO: 246 - DNA, 33 bp, synthetic construct
  misc_feature 1..33: note = Description of sequence: bifunctional oligonucleotide
  source 1..33: mol_type = other DNA
  modified_base 1: mod_base = um
  modified_base 2: mod_base = cm
  modified_base 3: mod_base = OTHER; note = locked nucleic acid
  modified_base 4: mod_base = um
  modified_base 5: mod_base = cm
  modified_base 6: mod_base = OTHER; note = 2'O-methyl-adenosine
  modified_base 7: mod_base = OTHER; note = locked nucleic acid
  modified_base 8: mod_base = cm
  modified_base 9: mod_base = um
  modified_base 10: mod_base = um
  modified_base 11: mod_base = OTHER; note = locked nucleic acid
  modified_base 12: mod_base = um
  modified_base 13: mod_base = cm
  modified_base 14: mod_base = cm
  modified_base 15: mod_base = OTHER; note = locked nucleic acid
  modified_base 16: mod_base = gm
  modified_base 17: mod_base = gm
  modified_base 18: mod_base = gm
  modified_base 19: mod_base = OTHER; note = locked nucleic acid
  modified_base 20: mod_base = cm
  modified_base 21: mod_base = gm
  modified_base 22: mod_base = cm
  modified_base 23: mod_base = cm
  modified_base 24: mod_base = OTHER; note = 2'O-methyl-adenosine
  modified_base 25: mod_base = gm
  modified_base 26: mod_base = gm
  modified_base 27: mod_base = um
  modified_base 28: mod_base = OTHER; note = 2'O-methyl-adenosine
  modified_base 29: mod_base = OTHER; note = 2'O-methyl-adenosine
  modified_base 30: mod_base = gm
  modified_base 31: mod_base = um
  modified_base 32: mod_base = OTHER; note = 2'O-methyl-adenosine
  modified_base 33: mod_base = um
  misc_feature 1..10: note = At this position backbone is RNA
  misc_feature 12..18: note = At this position backbone is RNA
  misc_feature 20..33: note = At this position backbone is RNA
tcatcagcttttccagggtcgccaggtaagtat

SEQ ID NO: 247 - DNA, 33 bp, synthetic construct
  misc_feature 1..33: note = Description of sequence: bifunctional oligonucleotide
  source 1..33: mol_type = other DNA
  modified_base 1: mod_base = gm
  modified_base 2: mod_base = gm
  modified_base 3: mod_base = OTHER; note = locked nucleic acid
  modified_base 4: mod_base = cm
  modified_base 5: mod_base = um
  modified_base 6: mod_base = um
  modified_base 7: mod_base = OTHER; note = locked nucleic acid
  modified_base 8: mod_base = OTHER; note = 2'O-methyl-adenosine
  modified_base 9: mod_base = um
  modified_base 10: mod_base = cm
  modified_base 11: mod_base = OTHER; note = locked nucleic acid
  modified_base 12: mod_base = gm
  modified_base 13: mod_base = cm
  modified_base 14: mod_base = um
  modified_base 15: mod_base = OTHER; note = locked nucleic acid
  modified_base 16: mod_base = um
  modified_base 17: mod_base = um
  modified_base 18: mod_base = cm
  modified_base 19: mod_base = OTHER; note = locked nucleic acid
  modified_base 20: mod_base = OTHER; note = 2'O-methyl-adenosine
  modified_base 21: mod_base = gm
  modified_base 22: mod_base = cm
  modified_base 23: mod_base = cm
  modified_base 24: mod_base = OTHER; note = 2'O-methyl-adenosine
  modified_base 25: mod_base = gm
  modified_base 26: mod_base = gm
  modified_base 27: mod_base = um
  modified_base 28: mod_base = OTHER; note = 2'O-methyl-adenosine
  modified_base 29: mod_base = OTHER; note = 2'O-methyl-adenosine
  modified_base 30: mod_base = gm
  modified_base 31: mod_base = um
  modified_base 32: mod_base = OTHER; note = 2'O-methyl-adenosine
  modified_base 33: mod_base = um
  misc_feature 1..14: note = At this position backbone is RNA
  misc_feature 16..33: note = At this position backbone is RNA
ggccttcatcagcttttccagccaggtaagtat

SEQ ID NO: 248 - DNA, 33 bp, synthetic construct
  misc_feature 1..33: note = Description of sequence: bifunctional oligonucleotide
  source 1..33: mol_type = other DNA
  modified_base 1: mod_base = um
  modified_base 2: mod_base = cm
  modified_base 3: mod_base = OTHER; note = locked nucleic acid
  modified_base 4: mod_base = OTHER; note = 2'O-methyl-adenosine
  modified_base 5: mod_base = OTHER; note = 2'O-methyl-adenosine
  modified_base 6: mod_base = gm
  modified_base 7: mod_base = OTHER; note = locked nucleic acid
  modified_base 8: mod_base = cm
  modified_base 9: mod_base = cm
  modified_base 10: mod_base = um
  modified_base 11: mod_base = OTHER; note = locked nucleic acid
  modified_base 12: mod_base = cm
  modified_base 13: mod_base = OTHER; note = 2'O-methyl-adenosine
  modified_base 14: mod_base = um
  modified_base 15: mod_base = OTHER; note = locked nucleic acid
  modified_base 16: mod_base = OTHER; note = 2'O-methyl-adenosine
  modified_base 17: mod_base = gm
  modified_base 18: mod_base = cm
  modified_base 19: mod_base = OTHER; note = locked nucleic acid
  modified_base 20: mod_base = um
  modified_base 21: mod_base = gm
  modified_base 22: mod_base = cm
  modified_base 23: mod_base = cm
  modified_base 24: mod_base = OTHER; note = 2'O-methyl-adenosine
  modified_base 25: mod_base = gm
  modified_base 26: mod_base = gm
  modified_base 27: mod_base = um
  modified_base 28: mod_base = OTHER; note = 2'O-methyl-adenosine
  modified_base 29: mod_base = OTHER; note = 2'O-methyl-adenosine
  modified_base 30: mod_base = gm
  modified_base 31: mod_base = um
  modified_base 32: mod_base = OTHER; note = 2'O-methyl-adenosine
  modified_base 33: mod_base = um
  misc_feature 1..10: note = At this position backbone is RNA
  misc_feature 12..18: note = At this position backbone is RNA
  misc_feature 20..33: note = At this position backbone is RNA
tcgaaggccttcatcagcttgccaggtaagtat

SEQ ID NO: 249 - DNA, 33 bp, synthetic construct
  misc_feature 1..33: note = Description of sequence: bifunctional oligonucleotide
  source 1..33: mol_type = other DNA
  modified_base 1: mod_base = gm
  modified_base 2: mod_base = gm
  modified_base 3: mod_base = OTHER; note = locked nucleic acid
  modified_base 4: mod_base = OTHER; note = 2'O-methyl-adenosine
  modified_base 5: mod_base = cm
  modified_base 6: mod_base = um
  modified_base 7: mod_base = OTHER; note = locked nucleic acid
  modified_base 8: mod_base = gm
  modified_base 9: mod_base = OTHER; note = 2'O-methyl-adenosine
  modified_base 10: mod_base = OTHER; note = 2'O-methyl-adenosine
  modified_base 11: mod_base = OTHER; note = locked nucleic acid
  modified_base 12: mod_base = gm
  modified_base 13: mod_base = cm
  modified_base 14: mod_base = cm
  modified_base 15: mod_base = OTHER; note = locked nucleic acid
  modified_base 16: mod_base = um
  modified_base 17: mod_base = cm
  modified_base 18: mod_base = OTHER; note = 2'O-methyl-adenosine
  modified_base 19: mod_base = OTHER; note = locked nucleic acid
  modified_base 20: mod_base = cm
  modified_base 21: mod_base = gm
  modified_base 22: mod_base = cm
  modified_base 23: mod_base = cm
  modified_base 24: mod_base = OTHER; note = 2'O-methyl-adenosine
  modified_base 25: mod_base = gm
  modified_base 26: mod_base = gm
  modified_base 27: mod_base = um
  modified_base 28: mod_base = OTHER; note = 2'O-methyl-adenosine
  modified_base 29: mod_base = OTHER; note = 2'O-methyl-adenosine
  modified_base 30: mod_base = gm
  modified_base 31: mod_base = um
  modified_base 32: mod_base = OTHER; note = 2'O-methyl-adenosine
  modified_base 33: mod_base = um
  misc_feature 1..14: note = At this position backbone is RNA
  misc_feature 16..18: note = At this position backbone is RNA
  misc_feature 20..33: note = At this position backbone is RNA
gggactcgaaggccttcatcgccaggtaagtat

SEQ ID NO: 250 - DNA, 33 bp, synthetic construct
  misc_feature 1..33: note = Description of sequence: bifunctional oligonucleotide
  source 1..33: mol_type = other DNA
  modified_base 1: mod_base = cm
  modified_base 2: mod_base = um
  modified_base 3: mod_base = OTHER; note = locked nucleic acid
  modified_base 4: mod_base = gm
  modified_base 5: mod_base = OTHER; note = 2'O-methyl-adenosine
  modified_base 6: mod_base = gm
  modified_base 7: mod_base = OTHER; note = locked nucleic acid
  modified_base 8: mod_base = gm
  modified_base 9: mod_base = OTHER; note = 2'O-methyl-adenosine
  modified_base 10: mod_base = cm
  modified_base 11: mod_base = OTHER; note = locked nucleic acid
  modified_base 12: mod_base = cm
  modified_base 13: mod_base = gm
  modified_base 14: mod_base = OTHER; note = 2'O-methyl-adenosine
  modified_base 15: mod_base = OTHER; note = locked nucleic acid
  modified_base 16: mod_base = gm
  modified_base 17: mod_base = gm
  modified_base 18: mod_base = cm
  modified_base 19: mod_base = OTHER; note = locked nucleic acid
  modified_base 20: mod_base = um
  modified_base 21: mod_base = gm
  modified_base 22: mod_base = cm
  modified_base 23: mod_base = cm
  modified_base 24: mod_base = OTHER; note = 2'O-methyl-adenosine
  modified_base 25: mod_base = gm
  modified_base 26: mod_base = gm
  modified_base 27: mod_base = um
  modified_base 28: mod_base = OTHER; note = 2'O-methyl-adenosine
  modified_base 29: mod_base = OTHER; note = 2'O-methyl-adenosine
  modified_base 30: mod_base = gm
  modified_base 31: mod_base = um
  modified_base 32: mod_base = OTHER; note = 2'O-methyl-adenosine
  modified_base 33: mod_base = um
  misc_feature 1..2: note = At this position backbone is RNA
  misc_feature 4..10: note = At this position backbone is RNA
  misc_feature 12..33: note = At this position backbone is RNA
cttgagggactcgaaggcctgccaggtaagtat

SEQ ID NO: 251 - DNA, 33 bp, synthetic construct
  misc_feature 1..33: note = Description of sequence: bifunctional oligonucleotide
  source 1..33: mol_type = other DNA
  modified_base 1: mod_base = OTHER; note = 2'O-methyl-adenosine
  modified_base 2: mod_base = OTHER; note = 2'O-methyl-adenosine
  modified_base 3: mod_base = OTHER; note = locked nucleic acid
  modified_base 4: mod_base = gm
  modified_base 5: mod_base = OTHER; note = 2'O-methyl-adenosine
  modified_base 6: mod_base = cm
  modified_base 7: mod_base = OTHER; note = locked nucleic acid
  modified_base 8: mod_base = um
  modified_base 9: mod_base = gm
  modified_base 10: mod_base = OTHER; note = 2'O-methyl-adenosine
  modified_base 11: mod_base = OTHER; note = locked nucleic acid
  modified_base 12: mod_base = gm
  modified_base 13: mod_base = gm
  modified_base 14: mod_base = OTHER; note = 2'O-methyl-adenosine
  modified_base 15: mod_base = OTHER; note = locked nucleic acid
  modified_base 16: mod_base = um
  modified_base 17: mod_base = cm
  modified_base 18: mod_base = gm
  modified_base 19: mod_base = OTHER; note = locked nucleic acid
  modified_base 20: mod_base = OTHER; note = 2'O-methyl-adenosine
  modified_base 21: mod_base = gm
  modified_base 22: mod_base = cm
  modified_base 23: mod_base = cm
  modified_base 24: mod_base = OTHER; note = 2'O-methyl-adenosine
  modified_base 25: mod_base = gm
  modified_base 26: mod_base = gm
  modified_base 27: mod_base = um
  modified_base 28: mod_base = OTHER; note = 2'O-methyl-adenosine
  modified_base 29: mod_base = OTHER; note = 2'O-methyl-adenosine
  modified_base 30: mod_base = gm
  modified_base 31: mod_base = um
  modified_base 32: mod_base = OTHER; note = 2'O-methyl-adenosine
  modified_base 33: mod_base = um
  misc_feature 1..6: note = At this position backbone is RNA
  misc_feature 8..33: note = At this position backbone is RNA
aaggacttgagggactcgaagccaggtaagtat

SEQ ID NO: 252 - DNA, 33 bp, synthetic construct
  misc_feature 1..33: note = Description of sequence: bifunctional oligonucleotide
  source 1..33: mol_type = other DNA
  modified_base 1: mod_base = gm
  modified_base 2: mod_base = cm
  modified_base 3: mod_base = OTHER; note = locked nucleic acid
  modified_base 4: mod_base = gm
  modified_base 5: mod_base = gm
  modified_base 6: mod_base = OTHER; note = 2'O-methyl-adenosine
  modified_base 7: mod_base = OTHER; note = locked nucleic acid
  modified_base 8: mod_base = gm
  modified_base 9: mod_base = gm
  modified_base 10: mod_base = OTHER; note = 2'O-methyl-adenosine
  modified_base 11: mod_base = OTHER; note = locked nucleic acid
  modified_base 12: mod_base = um
  modified_base 13: mod_base = um
  modified_base 14: mod_base = gm
  modified_base 15: mod_base = OTHER; note = locked nucleic acid
  modified_base 16: mod_base = gm
  modified_base 17: mod_base = gm
  modified_base 18: mod_base = gm
  modified_base 19: mod_base = OTHER; note = locked nucleic acid
  modified_base 20: mod_base = cm
  modified_base 21: mod_base = gm
  modified_base 22: mod_base = cm
  modified_base 23: mod_base = cm
  modified_base 24: mod_base = OTHER; note = 2'O-methyl-adenosine
  modified_base 25: mod_base = gm
  modified_base 26: mod_base = gm
  modified_base 27: mod_base = um
  modified_base 28: mod_base = OTHER; note = 2'O-methyl-adenosine
  modified_base 29: mod_base = OTHER; note = 2'O-methyl-adenosine
  modified_base 30: mod_base = gm
  modified_base 31: mod_base = um
  modified_base 32: mod_base = OTHER; note = 2'O-methyl-adenosine
  modified_base 33: mod_base = um
  misc_feature 1..2: note = At this position backbone is RNA
  misc_feature 4..33: note = At this position backbone is RNA
gctggaaggacttgagggacgccaggtaagtat

SEQ ID NO: 253 - RNA, 33 nt, synthetic construct
  misc_feature 1..33: note = Description of sequence: bifunctional oligonucleotide
  source 1..33: mol_type = other RNA
  modified_base 1: mod_base = gm
  modified_base 2: mod_base = cm
  modified_base 3: mod_base = cm
  modified_base 4: mod_base = OTHER; note = 2'O-methyl-adenosine
  modified_base 5: mod_base = gm
  modified_base 6: mod_base = gm
  modified_base 7: mod_base = um
  modified_base 8: mod_base = OTHER; note = 2'O-methyl-adenosine
  modified_base 9: mod_base = OTHER; note = 2'O-methyl-adenosine
  modified_base 10: mod_base = gm
  modified_base 11: mod_base = um
  modified_base 12: mod_base = OTHER; note = 2'O-methyl-adenosine
  modified_base 13: mod_base = um
  modified_base 14: mod_base = gm
  modified_base 15: mod_base = um
  modified_base 16: mod_base = OTHER; note = locked nucleic acid
  modified_base 17: mod_base = OTHER; note = 2'O-methyl-adenosine
  modified_base 18: mod_base = gm
  modified_base 19: mod_base = OTHER; note = 2'O-methyl-adenosine
  modified_base 20: mod_base = OTHER; note = locked nucleic acid
  modified_base 21: mod_base = OTHER; note = 2'O-methyl-adenosine
  modified_base 22: mod_base = um
  modified_base 23: mod_base = OTHER; note = 2'O-methyl-adenosine
  modified_base 24: mod_base = OTHER; note = locked nucleic acid
  modified_base 25: mod_base = OTHER; note = 2'O-methyl-adenosine
  modified_base 26: mod_base = cm
  modified_base 27: mod_base = OTHER; note = 2'O-methyl-adenosine
  modified_base 28: mod_base = OTHER; note = locked nucleic acid
  modified_base 29: mod_base = um
  modified_base 30: mod_base = OTHER; note = 2'O-methyl-adenosine
  modified_base 31: mod_base = cm
  modified_base 32: mod_base = OTHER; note = locked nucleic acid
  modified_base 33: mod_base = um
gccaggtaagtatgtcagaaatacacaatacct

SEQ ID NO: 254 - RNA, 33 nt, synthetic construct
  misc_feature 1..33: note = Description of sequence: bifunctional oligonucleotide
  source 1..33: mol_type = other RNA
  modified_base 1: mod_base = gm
  modified_base 2: mod_base = um
  modified_base 3: mod_base = OTHER; note = locked nucleic acid
  modified_base 4: mod_base = OTHER; note = 2'O-methyl-adenosine
  modified_base 5: mod_base = gm
  modified_base 6: mod_base = OTHER; note = 2'O-methyl-adenosine
  modified_base 7: mod_base = OTHER; note = locked nucleic acid
  modified_base 8: mod_base = OTHER; note = 2'O-methyl-adenosine
  modified_base 9: mod_base = um
  modified_base 10: mod_base = OTHER; note = 2'O-methyl-adenosine
  modified_base 11: mod_base = OTHER; note = locked nucleic acid
  modified_base 12: mod_base = OTHER; note = 2'O-methyl-adenosine
  modified_base 13: mod_base = cm
  modified_base 14: mod_base = OTHER; note = 2'O-methyl-adenosine
  modified_base 15: mod_base = OTHER; note = locked nucleic acid
  modified_base 16: mod_base = um
  modified_base 17: mod_base = OTHER; note = 2'O-methyl-adenosine
  modified_base 18: mod_base = cm
  modified_base 19: mod_base = OTHER; note = locked nucleic acid
  modified_base 20: mod_base = um
  modified_base 21: mod_base = gm
  modified_base 22: mod_base = cm
  modified_base 23: mod_base = cm
  modified_base 24: mod_base = OTHER; note = 2'O-methyl-adenosine
  modified_base 25: mod_base = gm
  modified_base 26: mod_base = gm
  modified_base 27: mod_base = um
  modified_base 28: mod_base = OTHER; note = 2'O-methyl-adenosine
  modified_base 29: mod_base = OTHER; note = 2'O-methyl-adenosine
  modified_base 30: mod_base = gm
  modified_base 31: mod_base = um
  modified_base 32: mod_base = OTHER; note = 2'O-methyl-adenosine
  modified_base 33: mod_base = um
gtcagaaatacacaatacctgccaggtaagtat

SEQ ID NO: 255 - RNA, 33 nt, synthetic construct; identical to SEQ ID NO: 125
  misc_feature 1..33: note = Description of sequence: bifunctional oligonucleotide
  source 1..33: mol_type = other RNA
  modified_base 1: mod_base = gm
  modified_base 2: mod_base = cm
  modified_base 3: mod_base = cm
  modified_base 4: mod_base = OTHER; note = 2'O-methyl-adenosine
  modified_base 5: mod_base = gm
  modified_base 6: mod_base = gm
  modified_base 7: mod_base = um
  modified_base 8: mod_base = OTHER; note = 2'O-methyl-adenosine
  modified_base 9: mod_base = OTHER; note = 2'O-methyl-adenosine
  modified_base 10: mod_base = gm
  modified_base 11: mod_base = um
  modified_base 12: mod_base = OTHER; note = 2'O-methyl-adenosine
  modified_base 13: mod_base = um
  modified_base 14: mod_base = OTHER; note = 2'O-methyl-adenosine
  modified_base 15: mod_base = OTHER; note = 2'O-methyl-adenosine
  modified_base 16: mod_base = OTHER; note = locked nucleic acid
  modified_base 17: mod_base = OTHER; note = 2'O-methyl-adenosine
  modified_base 18: mod_base = gm
  modified_base 19: mod_base = cm
  modified_base 20: mod_base = OTHER; note = locked nucleic acid
  modified_base 21: mod_base = gm
  modified_base 22: mod_base = OTHER; note = 2'O-methyl-adenosine
  modified_base 23: mod_base = OTHER; note = 2'O-methyl-adenosine
  modified_base 24: mod_base = OTHER; note = locked nucleic acid
  modified_base 25: mod_base = cm
  modified_base 26: mod_base = um
  modified_base 27: mod_base = gm
  modified_base 28: mod_base = OTHER; note = locked nucleic acid
  modified_base 29: mod_base = gm
  modified_base 30: mod_base = cm
  modified_base 31: mod_base = gm
  modified_base 32: mod_base = OTHER; note = locked nucleic acid
  modified_base 33: mod_base = cm
  misc_feature 1^2: note = phosphorothioate linkage
  misc_feature 2^3: note = phosphorothioate linkage
  misc_feature 3^4: note = phosphorothioate linkage
  misc_feature 4^5: note = phosphorothioate linkage

SEQ ID NO: 256 - RNA, 33 nt, synthetic construct; identical to SEQ ID NO: 125
  misc_feature 1..33: note = Description of sequence: bifunctional oligonucleotide
  source 1..33: mol_type = other RNA
  modified_base 1: mod_base = gm
  modified_base 2: mod_base = cm
  modified_base 3: mod_base = cm
  modified_base 4: mod_base = OTHER; note = 2'O-methyl-adenosine
  modified_base 5: mod_base = gm
  modified_base 6: mod_base = gm
  modified_base 7: mod_base = um
  modified_base 8: mod_base = OTHER; note = 2'O-methyl-adenosine
  modified_base 9: mod_base = OTHER; note = 2'O-methyl-adenosine
  modified_base 10: mod_base = gm
  modified_base 11: mod_base = um
  modified_base 12: mod_base = OTHER; note = 2'O-methyl-adenosine
  modified_base 13: mod_base = um
  modified_base 14: mod_base = OTHER; note = 2'O-methyl-adenosine
  modified_base 15: mod_base = OTHER; note = 2'O-methyl-adenosine
  modified_base 16: mod_base = OTHER; note = locked nucleic acid
  modified_base 17: mod_base = OTHER; note = 2'O-methyl-adenosine
  modified_base 18: mod_base = gm
  modified_base 19: mod_base = cm
  modified_base 20: mod_base = OTHER; note = locked nucleic acid
  modified_base 21: mod_base = gm
  modified_base 22: mod_base = OTHER; note = 2'O-methyl-adenosine
  modified_base 23: mod_base = OTHER; note = 2'O-methyl-adenosine
  modified_base 24: mod_base = OTHER; note = locked nucleic acid
  modified_base 25: mod_base = cm
  modified_base 26: mod_base = um
  modified_base 27: mod_base = gm
  modified_base 28: mod_base = OTHER; note = locked nucleic acid
  modified_base 29: mod_base = gm
  modified_base 30: mod_base = cm
  modified_base 31: mod_base = gm
  modified_base 32: mod_base = OTHER; note = locked nucleic acid
  modified_base 33: mod_base = cm
  misc_feature 29^30: note = phosphorothioate linkage
  misc_feature 30^31: note = phosphorothioate linkage
  misc_feature 31^32: note = phosphorothioate linkage
  misc_feature 32^33: note = phosphorothioate linkage

SEQ ID NO: 257 - RNA, 33 nt, synthetic construct; identical to SEQ ID NO: 125
  misc_feature 1..33: note = Description of sequence: bifunctional oligonucleotide
  source 1..33: mol_type = other RNA
  modified_base 1: mod_base = gm
  modified_base 2: mod_base = cm
  modified_base 3: mod_base = cm
  modified_base 4: mod_base = OTHER; note = 2'O-methyl-adenosine
  modified_base 5: mod_base = gm
  modified_base 6: mod_base = gm
  modified_base 7: mod_base = um
  modified_base 8: mod_base = OTHER; note = 2'O-methyl-adenosine
  modified_base 9: mod_base = OTHER; note = 2'O-methyl-adenosine
  modified_base 10: mod_base = gm
  modified_base 11: mod_base = um
  modified_base 12: mod_base = OTHER; note = 2'O-methyl-adenosine
  modified_base 13: mod_base = um
  modified_base 14: mod_base = OTHER; note = 2'O-methyl-adenosine
  modified_base 15: mod_base = OTHER; note = 2'O-methyl-adenosine
  modified_base 16: mod_base = OTHER; note = locked nucleic acid
  modified_base 17: mod_base = OTHER; note = 2'O-methyl-adenosine
  modified_base 18: mod_base = gm
  modified_base 19: mod_base = cm
  modified_base 20: mod_base = OTHER; note = locked nucleic acid
  modified_base 21: mod_base = gm
  modified_base 22: mod_base = OTHER; note = 2'O-methyl-adenosine
  modified_base 23: mod_base = OTHER; note = 2'O-methyl-adenosine
  modified_base 24: mod_base = OTHER; note = locked nucleic acid
  modified_base 25: mod_base = cm
  modified_base 26: mod_base = um
  modified_base 27: mod_base = gm
  modified_base 28: mod_base = OTHER; note = locked nucleic acid
  modified_base 29: mod_base = gm
  modified_base 30: mod_base = cm
  modified_base 31: mod_base = gm
  modified_base 32: mod_base = OTHER; note = locked nucleic acid
  modified_base 33: mod_base = cm
  misc_feature 1^2: note = phosphorothioate linkage
  misc_feature 2^3: note = phosphorothioate linkage
  misc_feature 3^4: note = phosphorothioate linkage
  misc_feature 4^5: note = phosphorothioate linkage
  misc_feature 29^30: note = phosphorothioate linkage
  misc_feature 30^31: note = phosphorothioate linkage
  misc_feature 31^32: note = phosphorothioate linkage
  misc_feature 32^33: note = phosphorothioate linkage

SEQ ID NO: 258 - RNA, 33 nt, synthetic construct; identical to SEQ ID NO: 125
  misc_feature 1..33: note = Description of sequence: bifunctional oligonucleotide
  source 1..33: mol_type = other RNA
  modified_base 1: mod_base = gm
  modified_base 2: mod_base = cm
  modified_base 3: mod_base = cm
  modified_base 4: mod_base = OTHER; note = 2'O-methyl-adenosine
  modified_base 5: mod_base = gm
  modified_base 6: mod_base = gm
  modified_base 7: mod_base = um
  modified_base 8: mod_base = OTHER; note = 2'O-methyl-adenosine
  modified_base 9: mod_base = OTHER; note = 2'O-methyl-adenosine
  modified_base 10: mod_base = gm
  modified_base 11: mod_base = um
  modified_base 12: mod_base = OTHER; note = 2'O-methyl-adenosine
  modified_base 13: mod_base = um
  modified_base 14: mod_base = OTHER; note = 2'-O-methoxy-ethyl adenosine
  modified_base 15: mod_base = OTHER; note = 2'-O-methoxy-ethyl adenosine
  modified_base 16: mod_base = OTHER; note = locked nucleic acid
  modified_base 17: mod_base = OTHER; note = 2'-O-methoxy-ethyl adenosine
  modified_base 18: mod_base = OTHER; note = 2'-O-methoxy-ethyl guanosine
  modified_base 19: mod_base = OTHER; note = 2'-O-methoxy-ethyl cytidine
  modified_base 20: mod_base = OTHER; note = locked nucleic acid
  modified_base 21: mod_base = OTHER; note = 2'-O-methoxy-ethyl guanosine
  modified_base 22: mod_base = OTHER; note = 2'-O-methoxy-ethyl adenosine
  modified_base 23: mod_base = OTHER; note = 2'-O-methoxy-ethyl adenosine
  modified_base 24: mod_base = OTHER; note = locked nucleic acid
  modified_base 25: mod_base = OTHER; note = 2'-O-methoxy-ethyl cytidine
  modified_base 26: mod_base = OTHER; note = 2'-o-methoxy-ethyl thymidine
  modified_base 27: mod_base = OTHER; note = 2'-O-methoxy-ethyl guanosine
  modified_base 28: mod_base = OTHER; note = locked nucleic acid
  modified_base 29: mod_base = OTHER; note = 2'-O-methoxy-ethyl guanosine
  modified_base 30: mod_base = OTHER; note = 2'-O-methoxy-ethyl cytidine
  modified_base 31: mod_base = OTHER; note = 2'-O-methoxy-ethyl guanosine
  modified_base 32: mod_base = OTHER; note = locked nucleic acid
  modified_base 33: mod_base = OTHER; note = 2', 3'-O-methoxy ethyl cytidine
  misc_feature 29^30: note = phosphorothioate linkage
  misc_feature 30^31: note = phosphorothioate linkage
  misc_feature 31^32: note = phosphorothioate linkage
  misc_feature 32^33: note = phosphorothioate linkage

SEQ ID NO: 259 - RNA, 33 nt, synthetic construct; identical to SEQ ID NO: 125
  misc_feature 1..33: note = Description of sequence: bifunctional oligonucleotide
  source 1..33: mol_type = other RNA
  modified_base 1: mod_base = gm
  modified_base 2: mod_base = cm
  modified_base 3: mod_base = cm
  modified_base 4: mod_base = OTHER; note = 2'O-methyl-adenosine
  modified_base 5: mod_base = gm
  modified_base 6: mod_base = gm
  modified_base 7: mod_base = um
  modified_base 8: mod_base = OTHER; note = 2'O-methyl-adenosine
  modified_base 9: mod_base = OTHER; note = 2'O-methyl-adenosine
  modified_base 10: mod_base = gm
  modified_base 11: mod_base = um
  modified_base 12: mod_base = OTHER; note = 2'O-methyl-adenosine
  modified_base 13: mod_base = um
  modified_base 14: mod_base = OTHER; note = 2'-O-methoxy-ethyl adenosine
  modified_base 15: mod_base = OTHER; note = 2'-O-methoxy-ethyl adenosine
  modified_base 16: mod_base = OTHER; note = locked nucleic acid
  modified_base 17: mod_base = OTHER; note = 2'-O-methoxy-ethyl adenosine
  modified_base 18: mod_base = OTHER; note = 2'-O-methoxy-ethyl guanosine
  modified_base 19: mod_base = OTHER; note = 2'-O-methoxy-ethyl cytidine
  modified_base 20: mod_base = OTHER; note = locked nucleic acid
  modified_base 21: mod_base = OTHER; note = 2'-O-methoxy-ethyl guanosine
  modified_base 22: mod_base = OTHER; note = 2'-O-methoxy-ethyl adenosine
  modified_base 23: mod_base = OTHER; note = 2'-O-methoxy-ethyl adenosine
  modified_base 24: mod_base = OTHER; note = locked nucleic acid
  modified_base 25: mod_base = OTHER; note = 2'-O-methoxy-ethyl cytidine
  modified_base 26: mod_base = OTHER; note = 2'-o-methoxy-ethyl thymidine
  modified_base 27: mod_base = OTHER; note = 2'-O-methoxy-ethyl guanosine
  modified_base 28: mod_base = OTHER; note = locked nucleic acid
  modified_base 29: mod_base = OTHER; note = 2'-O-methoxy-ethyl guanosine
  modified_base 30: mod_base = OTHER; note = 2'-O-methoxy-ethyl cytidine
  modified_base 31: mod_base = OTHER; note = 2'-O-methoxy-ethyl guanosine
  modified_base 32: mod_base = OTHER; note = locked nucleic acid
  modified_base 33: mod_base = OTHER; note = 2', 3'-O-methoxy ethyl cytidine
  misc_feature 1^2: note = phosphorothioate linkage
  misc_feature 2^3: note = phosphorothioate linkage
  misc_feature 3^4: note = phosphorothioate linkage
  misc_feature 4^5: note = phosphorothioate linkage
  misc_feature 29^30: note = phosphorothioate linkage
  misc_feature 30^31: note = phosphorothioate linkage
  misc_feature 31^32: note = phosphorothioate linkage
  misc_feature 32^33: note = phosphorothioate linkage

SEQ ID NO: 260 - RNA, 33 nt, synthetic construct; identical to SEQ ID NO: 125
  misc_feature 1..33: note = Description of sequence: bifunctional oligonucleotide
  source 1..33: mol_type = other RNA
  modified_base 1: mod_base = OTHER; note = 2', 5'-O-methoxy ethyl guanosine
  modified_base 2: mod_base = OTHER; note = locked nucleic acid
  modified_base 3: mod_base = OTHER; note = 2'-O-methoxy-ethyl cytidine
  modified_base 4: mod_base = OTHER; note = locked nucleic acid
  modified_base 5: mod_base = OTHER; note = 2'-O-methoxy-ethyl guanosine
  modified_base 6: mod_base = OTHER; note = locked nucleic acid
  modified_base 7: mod_base = OTHER; note = 2'-o-methoxy-ethyl thymidine
  modified_base 8: mod_base = OTHER; note = locked nucleic acid
  modified_base 9: mod_base = OTHER; note = 2'-O-methoxy-ethyl adenosine
  modified_base 10: mod_base = OTHER; note = locked nucleic acid
  modified_base 11: mod_base = OTHER; note = 2'-o-methoxy-ethyl thymidine
  modified_base 12: mod_base = OTHER; note = 2'-O-methoxy-ethyl adenosine
  modified_base 13: mod_base = OTHER; note = 2'-o-methoxy-ethyl thymidine
  modified_base 14: mod_base = OTHER; note = 2'O-methyl-adenosine
  modified_base 15: mod_base = OTHER; note = 2'O-methyl-adenosine
  modified_base 16: mod_base = OTHER; note = locked nucleic acid
  modified_base 17: mod_base = OTHER; note = 2'O-methyl-adenosine
  modified_base 18: mod_base = gm
  modified_base 19: mod_base = cm
  modified_base 20: mod_base = OTHER; note = locked nucleic acid
  modified_base 21: mod_base = gm
  modified_base 22: mod_base = OTHER; note = 2'O-methyl-adenosine
  modified_base 23: mod_base = OTHER; note = 2'O-methyl-adenosine
  modified_base 24: mod_base = OTHER; note = locked nucleic acid
  modified_base 25: mod_base = cm
  modified_base 26: mod_base = um
  modified_base 27: mod_base = gm
  modified_base 28: mod_base = OTHER; note = locked nucleic acid
  modified_base 29: mod_base = gm
  modified_base 30: mod_base = cm
  modified_base 31: mod_base = gm
  modified_base 32: mod_base = OTHER; note = locked nucleic acid
  modified_base 33: mod_base = cm
  misc_feature 1^2: note = phosphorothioate linkage
  misc_feature 2^3: note = phosphorothioate linkage
  misc_feature 3^4: note = phosphorothioate linkage
  misc_feature 4^5: note = phosphorothioate linkage

SEQ ID NO: 261 - RNA, 33 nt, synthetic construct; identical to SEQ ID NO: 125
  misc_feature 1..33: note = Description of sequence: bifunctional oligonucleotide
  source 1..33: mol_type = other RNA
  modified_base 1: mod_base = OTHER; note = 2', 5'-O-methoxy ethyl guanosine
  modified_base 2: mod_base = OTHER; note = locked nucleic acid
  modified_base 3: mod_base = OTHER; note = 2'-O-methoxy-ethyl cytidine
  modified_base 4: mod_base = OTHER; note = locked nucleic acid
  modified_base 5: mod_base = OTHER; note = 2'-O-methoxy-ethyl guanosine
  modified_base 6: mod_base = OTHER; note = locked nucleic acid
  modified_base 7: mod_base = OTHER; note = 2'-o-methoxy-ethyl thymidine
  modified_base 8: mod_base = OTHER; note = locked nucleic acid
  modified_base 9: mod_base = OTHER; note = 2'-O-methoxy-ethyl adenosine
  modified_base 10: mod_base = OTHER; note = locked nucleic acid
  modified_base 11: mod_base = OTHER; note = 2'-o-methoxy-ethyl thymidine
  modified_base 12: mod_base = OTHER; note = 2'-O-methoxy-ethyl adenosine
  modified_base 13: mod_base = OTHER; note = 2'-o-methoxy-ethyl thymidine
  modified_base 14: mod_base = OTHER; note = 2'O-methyl-adenosine
  modified_base 15: mod_base = OTHER; note = 2'O-methyl-adenosine
  modified_base 16: mod_base = OTHER; note = locked nucleic acid
  modified_base 17: mod_base = OTHER; note = 2'O-methyl-adenosine
  modified_base 18: mod_base = gm
  modified_base 19: mod_base = cm
  modified_base 20: mod_base = OTHER; note = locked nucleic acid
  modified_base 21: mod_base = gm
  modified_base 22: mod_base = OTHER; note = 2'O-methyl-adenosine
  modified_base 23: mod_base = OTHER; note = 2'O-methyl-adenosine
  modified_base 24: mod_base = OTHER; note = locked nucleic acid
  modified_base 25: mod_base = cm
  modified_base 26: mod_base = um
  modified_base 27: mod_base = gm
  modified_base 28: mod_base = OTHER; note = locked nucleic acid
  modified_base 29: mod_base = gm
  modified_base 30: mod_base = cm
  modified_base 31: mod_base = gm
  modified_base 32: mod_base = OTHER; note = locked nucleic acid
  modified_base 33: mod_base = cm
  misc_feature 1^2: note = phosphorothioate linkage
  misc_feature 2^3: note = phosphorothioate linkage
  misc_feature 3^4: note = phosphorothioate linkage
  misc_feature 4^5: note = phosphorothioate linkage
  misc_feature 29^30: note = phosphorothioate linkage
  misc_feature 30^31: note = phosphorothioate linkage
  misc_feature 31^32: note = phosphorothioate linkage
  misc_feature 32^33: note = phosphorothioate linkage

SEQ ID NO: 262 - RNA, 33 nt, synthetic construct; identical to SEQ ID NO: 125
  misc_feature 1..33: note = Description of sequence: bifunctional oligonucleotide
  source 1..33: mol_type = other RNA
  modified_base 1: mod_base = OTHER; note = 2', 5'-O-methoxy ethyl guanosine
  modified_base 2: mod_base = OTHER; note = locked nucleic acid
  modified_base 3: mod_base = OTHER; note = 2'-O-methoxy-ethyl cytidine
  modified_base 4: mod_base = OTHER; note = locked nucleic acid
  modified_base 5: mod_base = OTHER; note = 2'-O-methoxy-ethyl guanosine
  modified_base 6: mod_base = OTHER; note = locked nucleic acid
  modified_base 7: mod_base = OTHER; note = 2'-o-methoxy-ethyl thymidine
  modified_base 8: mod_base = OTHER; note = locked nucleic acid
  modified_base 9: mod_base = OTHER; note = 2'-O-methoxy-ethyl adenosine
  modified_base 10: mod_base = OTHER; note = locked nucleic acid
  modified_base 11: mod_base = OTHER; note = 2'-o-methoxy-ethyl thymidine
  modified_base 12: mod_base = OTHER; note = 2'-O-methoxy-ethyl adenosine
  modified_base 13: mod_base = OTHER; note = 2'-o-methoxy-ethyl thymidine
  modified_base 14: mod_base = OTHER; note = 2'-O-methoxy-ethyl adenosine
  modified_base 15: mod_base = OTHER; note = 2'-O-methoxy-ethyl adenosine
  modified_base 16: mod_base = OTHER; note = locked nucleic acid
  modified_base 17: mod_base = OTHER; note = 2'-O-methoxy-ethyl adenosine
  modified_base 18: mod_base = OTHER; note = 2'-O-methoxy-ethyl guanosine
  modified_base 19: mod_base = OTHER; note = 2'-O-methoxy-ethyl cytidine
  modified_base 20: mod_base = OTHER; note = locked nucleic acid
  modified_base 21: mod_base = OTHER; note = 2'-O-methoxy-ethyl guanosine
  modified_base 22: mod_base = OTHER; note = 2'-O-methoxy-ethyl adenosine
  modified_base 23: mod_base = OTHER; note = 2'-O-methoxy-ethyl adenosine
  modified_base 24: mod_base = OTHER; note = locked nucleic acid
  modified_base 25: mod_base = OTHER; note = 2'-O-methoxy-ethyl cytidine
  modified_base 26: mod_base = OTHER; note = 2'-o-methoxy-ethyl thymidine
  modified_base 27: mod_base = OTHER; note = 2'-O-methoxy-ethyl guanosine
  modified_base 28: mod_base = OTHER; note = locked nucleic acid
  modified_base 29: mod_base = OTHER; note = 2'-O-methoxy-ethyl guanosine
  modified_base 30: mod_base = OTHER; note = 2'-O-methoxy-ethyl cytidine
  modified_base 31: mod_base = OTHER; note = 2'-O-methoxy-ethyl guanosine
  modified_base 32: mod_base = OTHER; note = locked nucleic acid
  modified_base 33: mod_base = OTHER; note = 2', 3'-O-methoxy ethyl cytidine
  misc_feature 1^2: note = phosphorothioate linkage
  misc_feature 2^3: note = phosphorothioate linkage
  misc_feature 3^4: note = phosphorothioate linkage
  misc_feature 4^5: note = phosphorothioate linkage
  misc_feature 29^30: note = phosphorothioate linkage
  misc_feature 30^31: note = phosphorothioate linkage
  misc_feature 31^32: note = phosphorothioate linkage
  misc_feature 32^33: note = phosphorothioate linkage

SEQ ID NO: 263 - DNA, 33 bp, synthetic construct; identical to SEQ ID NO: 184
  misc_feature 1..33: note = Description of sequence: bifunctional oligonucleotide
  source 1..33: mol_type = other DNA
  modified_base 1: mod_base = gm
  modified_base 2: mod_base = cm
  modified_base 3: mod_base = cm
  modified_base 4: mod_base = OTHER; note = 2'O-methyl-adenosine
  modified_base 5: mod_base = gm
  modified_base 6: mod_base = gm
  modified_base 7: mod_base = um
  modified_base 8: mod_base = OTHER; note = 2'O-methyl-adenosine
  modified_base 9: mod_base = OTHER; note = 2'O-methyl-adenosine
  modified_base 10: mod_base = gm
  modified_base 11: mod_base = um
  modified_base 12: mod_base = OTHER; note = 2'O-methyl-adenosine
  modified_base 13: mod_base = um
  modified_base 14: mod_base = um
  modified_base 15: mod_base = um
  modified_base 16: mod_base = OTHER; note = locked nucleic acid
  modified_base 17: mod_base = cm
  modified_base 18: mod_base = OTHER; note = 2'O-methyl-adenosine
  modified_base 19: mod_base = gm
  modified_base 20: mod_base = OTHER; note = locked nucleic acid
  modified_base 21: mod_base = gm
  modified_base 22: mod_base = um
  modified_base 23: mod_base = cm
  modified_base 24: mod_base = OTHER; note = locked nucleic acid
  modified_base 25: mod_base = cm
  modified_base 26: mod_base = cm
  modified_base 27: mod_base = OTHER; note = 2'O-methyl-adenosine
  modified_base 28: mod_base = OTHER; note = locked nucleic acid
  modified_base 29: mod_base = gm
  modified_base 30: mod_base = gm
  modified_base 31: mod_base = cm
  modified_base 32: mod_base = OTHER; note = locked nucleic acid
  modified_base 33: mod_base = gm
  misc_feature 1^2: note = phosphorothioate linkage
  misc_feature 2^3: note = phosphorothioate linkage
  misc_feature 3^4: note = phosphorothioate linkage
  misc_feature 4^5: note = phosphorothioate linkage
  misc_feature 1..27: note = At this position backbone is RNA
  misc_feature 29..33: note = At this position backbone is RNA

SEQ ID NO: 264 - DNA, 33 bp, synthetic construct; identical to SEQ ID NO: 184
  misc_feature 1..33: note = Description of sequence: bifunctional oligonucleotide
  source 1..33: mol_type = other DNA
  modified_base 1: mod_base = gm
  modified_base 2: mod_base = cm
  modified_base 3: mod_base = cm
  modified_base 4: mod_base = OTHER; note = 2'O-methyl-adenosine
  modified_base 5: mod_base = gm
  modified_base 6: mod_base = gm
  modified_base 7: mod_base = um
  modified_base 8: mod_base = OTHER; note = 2'O-methyl-adenosine
  modified_base 9: mod_base = OTHER; note = 2'O-methyl-adenosine
  modified_base 10: mod_base = gm
  modified_base 11: mod_base = um
  modified_base 12: mod_base = OTHER; note = 2'O-methyl-adenosine
  modified_base 13: mod_base = um
  modified_base 14: mod_base = um
  modified_base 15: mod_base = um
  modified_base 16: mod_base = OTHER; note = locked nucleic acid
  modified_base 17: mod_base = cm
  modified_base 18: mod_base = OTHER; note = 2'O-methyl-adenosine
  modified_base 19: mod_base = gm
  modified_base 20: mod_base = OTHER; note = locked nucleic acid
  modified_base 21: mod_base = gm
  modified_base 22: mod_base = um
  modified_base 23: mod_base = cm
  modified_base 24: mod_base = OTHER; note = locked nucleic acid
  modified_base 25: mod_base = cm
  modified_base 26: mod_base = cm
  modified_base 27: mod_base = OTHER; note = 2'O-methyl-adenosine
  modified_base 28: mod_base = OTHER; note = locked nucleic acid
  modified_base 29: mod_base = gm
  modified_base 30: mod_base = gm
  modified_base 31: mod_base = cm
  modified_base 32: mod_base = OTHER; note = locked nucleic acid
  modified_base 33: mod_base = gm
  misc_feature 29^30: note = phosphorothioate linkage
  misc_feature 30^31: note = phosphorothioate linkage
  misc_feature 31^32: note = phosphorothioate linkage
  misc_feature 32^33: note = phosphorothioate linkage
  misc_feature 1..27: note = At this position backbone is RNA
  misc_feature 29..33: note = At this position backbone is RNA

SEQ ID NO: 265 - DNA, 33 bp, synthetic construct; identical to SEQ ID NO: 184
  misc_feature 1..33: note = Description of sequence: bifunctional oligonucleotide
  source 1..33: mol_type = other DNA
  modified_base 1: mod_base = gm
  modified_base 2: mod_base = cm
  modified_base 3: mod_base = cm
  modified_base 4: mod_base = OTHER; note = 2'O-methyl-adenosine
  modified_base 5: mod_base = gm
  modified_base 6: mod_base = gm
  modified_base 7: mod_base = um
  modified_base 8: mod_base = OTHER; note = 2'O-methyl-adenosine
  modified_base 9: mod_base = OTHER; note = 2'O-methyl-adenosine
  modified_base 10: mod_base = gm
  modified_base 11: mod_base = um
  modified_base 12: mod_base = OTHER; note = 2'O-methyl-adenosine
  modified_base 13: mod_base = um
  modified_base 14: mod_base = um
  modified_base 15: mod_base = um
  modified_base 16: mod_base = OTHER; note = locked nucleic acid
  modified_base 17: mod_base = cm
  modified_base 18: mod_base = OTHER; note = 2'O-methyl-adenosine
  modified_base 19: mod_base = gm
  modified_base 20: mod_base = OTHER; note = locked nucleic acid
  modified_base 21: mod_base = gm
  modified_base 22: mod_base = um
  modified_base 23: mod_base = cm
  modified_base 24: mod_base = OTHER; note = locked nucleic acid
  modified_base 25: mod_base = cm
  modified_base 26: mod_base = cm
  modified_base 27: mod_base = OTHER; note = 2'O-methyl-adenosine
  modified_base 28: mod_base = OTHER; note = locked nucleic acid
  modified_base 29: mod_base = gm
  modified_base 30: mod_base = gm
  modified_base 31: mod_base = cm
  modified_base 32: mod_base = OTHER; note = locked nucleic acid
  modified_base 33: mod_base = gm
  misc_feature 1^2: note = phosphorothioate linkage
  misc_feature 2^3: note = phosphorothioate linkage
  misc_feature 3^4: note = phosphorothioate linkage
  misc_feature 4^5: note = phosphorothioate linkage
  misc_feature 29^30: note = phosphorothioate linkage
  misc_feature 30^31: note = phosphorothioate linkage
  misc_feature 31^32: note = phosphorothioate linkage
  misc_feature 32^33: note = phosphorothioate linkage
  misc_feature 1..27: note = At this position backbone is RNA
  misc_feature 29..33: note = At this position backbone is RNA

SEQ ID NO: 266 - DNA, 33 bp, synthetic construct; identical to SEQ ID NO: 184
  misc_feature 1..33: note = Description of sequence: bifunctional oligonucleotide
  source 1..33: mol_type = other DNA
  modified_base 1: mod_base = gm
  modified_base 2: mod_base = cm
  modified_base 3: mod_base = cm
  modified_base 4: mod_base = OTHER; note = 2'O-methyl-adenosine
  modified_base 5: mod_base = gm
  modified_base 6: mod_base = gm
  modified_base 7: mod_base = um
  modified_base 8: mod_base = OTHER; note = 2'O-methyl-adenosine
  modified_base 9: mod_base = OTHER; note = 2'O-methyl-adenosine
  modified_base 10: mod_base = gm
  modified_base 11: mod_base = um
  modified_base 12: mod_base = OTHER; note = 2'O-methyl-adenosine
  modified_base 13: mod_base = um
  modified_base 14: mod_base = OTHER; note = 2'-o-methoxy-ethyl thymidine
  modified_base 15: mod_base = OTHER; note = 2'-o-methoxy-ethyl thymidine
  modified_base 16: mod_base = OTHER; note = locked nucleic acid
  modified_base 17: mod_base = OTHER; note = 2'-O-methoxy-ethyl cytidine
  modified_base 18: mod_base = OTHER; note = 2'-O-methoxy-ethyl adenosine
  modified_base 19: mod_base = OTHER; note = 2'-O-methoxy-ethyl guanosine
  modified_base 20: mod_base = OTHER; note = locked nucleic acid
  modified_base 21: mod_base = OTHER; note = 2'-O-methoxy-ethyl guanosine
  modified_base 22: mod_base = OTHER; note = 2'-o-methoxy-ethyl thymidine
  modified_base 23: mod_base = OTHER; note = 2'-O-methoxy-ethyl cytidine
  modified_base 24: mod_base = OTHER; note = locked nucleic acid
  modified_base 25: mod_base = OTHER; note = 2'-O-methoxy-ethyl cytidine
  modified_base 26: mod_base = OTHER; note = 2'-O-methoxy-ethyl cytidine
  modified_base 27: mod_base = OTHER; note = 2'-O-methoxy-ethyl adenosine
  modified_base 28: mod_base = OTHER; note = locked nucleic acid
  modified_base 29: mod_base = OTHER; note = 2'-O-methoxy-ethyl guanosine
  modified_base 30: mod_base = OTHER; note = 2'-O-methoxy-ethyl guanosine
  modified_base 31: mod_base = OTHER; note = 2'-O-methoxy-ethyl cytidine
  modified_base 32: mod_base = OTHER; note = locked nucleic acid
  modified_base 33: mod_base = OTHER; note = 2', 3'-O-methoxy ethyl guanosine
  misc_feature 29^30: note = phosphorothioate linkage
  misc_feature 30^31: note = phosphorothioate linkage
  misc_feature 31^32: note = phosphorothioate linkage
  misc_feature 32^33: note = phosphorothioate linkage
  misc_feature 1..27: note = At this position backbone is RNA
  misc_feature 29..33: note = At this position backbone is RNA

SEQ ID NO: 267 - DNA, 33 bp, synthetic construct; identical to SEQ ID NO: 184
  misc_feature 1..33: note = Description of sequence: bifunctional oligonucleotide
  source 1..33: mol_type = other DNA
  modified_base 1: mod_base = gm
  modified_base 2: mod_base = cm
  modified_base 3: mod_base = cm
  modified_base 4: mod_base = OTHER; note = 2'O-methyl-adenosine
  modified_base 5: mod_base = gm
  modified_base 6: mod_base = gm
  modified_base 7: mod_base = um
  modified_base 8: mod_base = OTHER; note = 2'O-methyl-adenosine
  modified_base 9: mod_base = OTHER; note = 2'O-methyl-adenosine
  modified_base 10: mod_base = gm
  modified_base 11: mod_base = um
  modified_base 12: mod_base = OTHER; note = 2'O-methyl-adenosine
  modified_base 13: mod_base = um
  modified_base 14: mod_base = OTHER; note = 2'-o-methoxy-ethyl thymidine
  modified_base 15: mod_base = OTHER; note = 2'-o-methoxy-ethyl thymidine
  modified_base 16: mod_base = OTHER; note = locked nucleic acid
  modified_base 17: mod_base = OTHER; note = 2'-O-methoxy-ethyl cytidine
  modified_base 18: mod_base = OTHER; note = 2'-O-methoxy-ethyl adenosine
  modified_base 19: mod_base = OTHER; note = 2'-O-methoxy-ethyl guanosine
  modified_base 20: mod_base = OTHER; note = locked nucleic acid
  modified_base 21: mod_base = OTHER; note = 2'-O-methoxy-ethyl guanosine
  modified_base 22: mod_base = OTHER; note = 2'-o-methoxy-ethyl thymidine
  modified_base 23: mod_base = OTHER; note = 2'-O-methoxy-ethyl cytidine
  modified_base 24: mod_base = OTHER; note = locked nucleic acid
  modified_base 25: mod_base = OTHER; note = 2'-O-methoxy-ethyl cytidine
  modified_base 26: mod_base = OTHER; note = 2'-O-methoxy-ethyl cytidine
  modified_base 27: mod_base = OTHER; note = 2'-O-methoxy-ethyl adenosine
  modified_base 28: mod_base = OTHER; note = locked nucleic acid
  modified_base 29: mod_base = OTHER; note = 2'-O-methoxy-ethyl guanosine
  modified_base 30: mod_base = OTHER; note = 2'-O-methoxy-ethyl guanosine
  modified_base 31: mod_base = OTHER; note = 2'-O-methoxy-ethyl cytidine
  modified_base 32: mod_base = OTHER; note = locked nucleic acid
  modified_base 33: mod_base = OTHER; note = 2', 3'-O-methoxy ethyl guanosine
  misc_feature 1^2: note = phosphorothioate linkage
  misc_feature 2^3: note = phosphorothioate linkage
  misc_feature 3^4: note = phosphorothioate linkage
  misc_feature 4^5: note = phosphorothioate linkage
  misc_feature 29^30: note = phosphorothioate linkage
  misc_feature 30^31: note = phosphorothioate linkage
  misc_feature 31^32: note = phosphorothioate linkage
  misc_feature 32^33: note = phosphorothioate linkage
  misc_feature 1..27: note = At this position backbone is RNA
  misc_feature 29..33: note = At this position backbone is RNA

SEQ ID NO: 268 - DNA, 33 bp, synthetic construct; identical to SEQ ID NO: 184
  misc_feature 1..33: note = Description of sequence: bifunctional oligonucleotide
  source 1..33: mol_type = other DNA
  modified_base 1: mod_base = OTHER; note = 2', 5'-O-methoxy ethyl guanosine
  modified_base 2: mod_base = OTHER; note = locked nucleic acid
  modified_base 3: mod_base = OTHER; note = 2'-O-methoxy-ethyl cytidine
  modified_base 4: mod_base = OTHER; note = locked nucleic acid
  modified_base 5: mod_base = OTHER; note = 2'-O-methoxy-ethyl guanosine
  modified_base 6: mod_base = OTHER; note = locked nucleic acid
  modified_base 7: mod_base = OTHER; note = 2'-o-methoxy-ethyl thymidine
  modified_base 8: mod_base = OTHER; note = locked nucleic acid
  modified_base 9: mod_base = OTHER; note = 2'-O-methoxy-ethyl adenosine
  modified_base 10: mod_base = OTHER; note = locked nucleic acid
  modified_base 11: mod_base = OTHER; note = 2'-o-methoxy-ethyl thymidine
  modified_base 12: mod_base = OTHER; note = 2'-O-methoxy-ethyl adenosine
  modified_base 13: mod_base = OTHER; note = 2'-o-methoxy-ethyl thymidine
  modified_base 14: mod_base = um
  modified_base 15: mod_base = um
  modified_base 16: mod_base = OTHER; note = locked nucleic acid
  modified_base 17: mod_base = cm
  modified_base 18: mod_base = OTHER; note = 2'O-methyl-adenosine
  modified_base 19: mod_base = gm
  modified_base 20: mod_base = OTHER; note = locked nucleic acid
  modified_base 21: mod_base = gm
  modified_base 22: mod_base = um
  modified_base 23: mod_base = cm
  modified_base 24: mod_base = OTHER; note = locked nucleic acid
  modified_base 25: mod_base = cm
  modified_base 26: mod_base = cm
  modified_base 27: mod_base = OTHER; note = 2'O-methyl-adenosine
  modified_base 28: mod_base = OTHER; note = locked nucleic acid
  modified_base 29: mod_base = gm
  modified_base 30: mod_base = gm
  modified_base 31: mod_base = cm
  modified_base 32: mod_base = OTHER; note = locked nucleic acid
  modified_base 33: mod_base = gm
  misc_feature 1^2: note = phosphorothioate linkage
  misc_feature 2^3: note = phosphorothioate linkage
  misc_feature 3^4: note = phosphorothioate linkage
  misc_feature 4^5: note = phosphorothioate linkage
  misc_feature 1..27: note = At this position backbone is RNA
  misc_feature 29..33: note = At this position backbone is RNA

SEQ ID NO: 269 - DNA, 33 bp, synthetic construct; identical to SEQ ID NO: 184
  misc_feature 1..33: note = Description of sequence: bifunctional oligonucleotide
  source 1..33: mol_type = other DNA
  modified_base 1: mod_base = OTHER; note = 2', 5'-O-methoxy ethyl guanosine
  modified_base 2: mod_base = OTHER; note = locked nucleic acid
  modified_base 3: mod_base = OTHER; note = 2'-O-methoxy-ethyl cytidine
  modified_base 4: mod_base = OTHER; note = locked nucleic acid
  modified_base 5: mod_base = OTHER; note = 2'-O-methoxy-ethyl guanosine
  modified_base 6: mod_base = OTHER; note = locked nucleic acid
  modified_base 7: mod_base = OTHER; note = 2'-o-methoxy-ethyl thymidine
  modified_base 8: mod_base = OTHER; note = locked nucleic acid
  modified_base 9: mod_base = OTHER; note = 2'-O-methoxy-ethyl adenosine
  modified_base 10: mod_base = OTHER; note = locked nucleic acid
  modified_base 11: mod_base = OTHER; note = 2'-o-methoxy-ethyl thymidine
  modified_base 12: mod_base = OTHER; note = 2'-O-methoxy-ethyl adenosine
  modified_base 13: mod_base = OTHER; note = 2'-o-methoxy-ethyl thymidine
  modified_base 14: mod_base = um
  modified_base 15: mod_base = um
  modified_base 16: mod_base = OTHER; note = locked nucleic acid
  modified_base 17: mod_base = cm
  modified_base 18: mod_base = OTHER; note = 2'O-methyl-adenosine
  modified_base 19: mod_base = gm
  modified_base 20: mod_base = OTHER; note = locked nucleic acid
  modified_base 21: mod_base = gm
  modified_base 22: mod_base = um
  modified_base 23: mod_base = cm
  modified_base 24: mod_base = OTHER; note = locked nucleic acid
  modified_base 25: mod_base = cm
  modified_base 26: mod_base = cm
  modified_base 27: mod_base = OTHER; note = 2'O-methyl-adenosine
  modified_base 28: mod_base = OTHER; note = locked nucleic acid
  modified_base 29: mod_base = gm
  modified_base 30: mod_base = gm
  modified_base 31: mod_base = cm
  modified_base 32: mod_base = OTHER; note = locked nucleic acid
  modified_base 33: mod_base = gm
  misc_feature 1^2: note = phosphorothioate linkage
  misc_feature 2^3: note = phosphorothioate linkage
  misc_feature 3^4: note = phosphorothioate linkage
  misc_feature 4^5: note = phosphorothioate linkage
  misc_feature 29^30: note = phosphorothioate linkage
  misc_feature 30^31: note = phosphorothioate linkage
  misc_feature 31^32: note = phosphorothioate linkage
  misc_feature 32^33: note = phosphorothioate linkage
  misc_feature 1..27: note = At this position backbone is RNA
  misc_feature 29..33: note = At this position backbone is RNA

SEQ ID NO: 270 - DNA, 33 bp, synthetic construct; identical to SEQ ID NO: 184
  misc_feature 1..33: note = Description of sequence: bifunctional oligonucleotide
  source 1..33: mol_type = other DNA
  modified_base 1: mod_base = OTHER; note = 2', 5'-O-methoxy ethyl guanosine
  modified_base 2: mod_base = OTHER; note = locked nucleic acid
  modified_base 3: mod_base = OTHER; note = 2'-O-methoxy-ethyl cytidine
  modified_base 4: mod_base = OTHER; note = locked nucleic acid
  modified_base 5: mod_base = OTHER; note = 2'-O-methoxy-ethyl guanosine
  modified_base 6: mod_base = OTHER; note = locked nucleic acid
  modified_base 7: mod_base = OTHER; note = 2'-o-methoxy-ethyl thymidine
  modified_base 8: mod_base = OTHER; note = locked nucleic acid
  modified_base 9: mod_base = OTHER; note = 2'-O-methoxy-ethyl adenosine
  modified_base 10: mod_base = OTHER; note = locked nucleic acid
  modified_base 11: mod_base = OTHER; note = 2'-o-methoxy-ethyl thymidine
  modified_base 12: mod_base = OTHER; note = 2'-O-methoxy-ethyl adenosine
  modified_base 13: mod_base = OTHER; note = 2'-o-methoxy-ethyl thymidine
  modified_base 14: mod_base = OTHER; note = 2'-o-methoxy-ethyl thymidine
  modified_base 15: mod_base = OTHER; note = 2'-o-methoxy-ethyl thymidine
  modified_base 16: mod_base = OTHER; note = locked nucleic acid
  modified_base 17: mod_base = OTHER; note = 2'-O-methoxy-ethyl cytidine
  modified_base 18: mod_base = OTHER; note = 2'-O-methoxy-ethyl adenosine
  modified_base 19: mod_base = OTHER; note = 2'-O-methoxy-ethyl guanosine
  modified_base 20: mod_base = OTHER; note = locked nucleic acid
  modified_base 21: mod_base = OTHER; note = 2'-O-methoxy-ethyl guanosine
  modified_base 22: mod_base = OTHER; note = 2'-o-methoxy-ethyl thymidine
  modified_base 23: mod_base = OTHER; note = 2'-O-methoxy-ethyl cytidine
  modified_base 24: mod_base = OTHER; note = locked nucleic acid
  modified_base 25: mod_base = OTHER; note = 2'-O-methoxy-ethyl cytidine
  modified_base 26: mod_base = OTHER; note = 2'-O-methoxy-ethyl cytidine
  modified_base 27: mod_base = OTHER; note = 2'-O-methoxy-ethyl adenosine
  modified_base 28: mod_base = OTHER; note = locked nucleic acid
  modified_base 29: mod_base = OTHER; note = 2'-O-methoxy-ethyl guanosine
  modified_base 30: mod_base = OTHER; note = 2'-O-methoxy-ethyl guanosine
  modified_base 31: mod_base = OTHER; note = 2'-O-methoxy-ethyl cytidine
  modified_base 32: mod_base = OTHER; note = locked nucleic acid
  modified_base 33: mod_base = OTHER; note = 2', 3'-O-methoxy ethyl guanosine
  misc_feature 1^2: note = phosphorothioate linkage
  misc_feature 2^3: note = phosphorothioate linkage
  misc_feature 3^4: note = phosphorothioate linkage
  misc_feature 4^5: note = phosphorothioate linkage
  misc_feature 29^30: note = phosphorothioate linkage
  misc_feature 30^31: note = phosphorothioate linkage
  misc_feature 31^32: note = phosphorothioate linkage
  misc_feature 32^33: note = phosphorothioate linkage
  misc_feature 1..27: note = At this position backbone is RNA
  misc_feature 29..33: note = At this position backbone is RNA

SEQ ID NO: 271 - DNA, 33 bp, synthetic construct; identical to SEQ ID NO: 191
  misc_feature 1..33: note = Description of sequence: bifunctional oligonucleotide
  source 1..33: mol_type = other DNA
  modified_base 1: mod_base = gm
  modified_base 2: mod_base = cm
  modified_base 3: mod_base = cm
  modified_base 4: mod_base = OTHER; note = 2'O-methyl-adenosine
  modified_base 5: mod_base = gm
  modified_base 6: mod_base = gm
  modified_base 7: mod_base = um
  modified_base 8: mod_base = OTHER; note = 2'O-methyl-adenosine
  modified_base 9: mod_base = OTHER; note = 2'O-methyl-adenosine
  modified_base 10: mod_base = gm
  modified_base 11: mod_base = um
  modified_base 12: mod_base = OTHER; note = 2'O-methyl-adenosine
  modified_base 13: mod_base = um
  modified_base 14: mod_base = um
  modified_base 15: mod_base = cm
  modified_base 16: mod_base = OTHER; note = locked nucleic acid
  modified_base 17: mod_base = gm
  modified_base 18: mod_base = cm
  modified_base 19: mod_base = um
  modified_base 20: mod_base = OTHER; note = locked nucleic acid
  modified_base 21: mod_base = um
  modified_base 22: mod_base = um
  modified_base 23: mod_base = cm
  modified_base 24: mod_base = OTHER; note = locked nucleic acid
  modified_base 25: mod_base = OTHER; note = 2'O-methyl-adenosine
  modified_base 26: mod_base = gm
  modified_base 27: mod_base = gm
  modified_base 28: mod_base = OTHER; note = locked nucleic acid
  modified_base 29: mod_base = um
  modified_base 30: mod_base = cm
  modified_base 31: mod_base = gm
  modified_base 32: mod_base = OTHER; note = locked nucleic acid
  modified_base 33: mod_base = cm
  misc_feature 1^2: note = phosphorothioate linkage
  misc_feature 2^3: note = phosphorothioate linkage
  misc_feature 3^4: note = phosphorothioate linkage
  misc_feature 4^5: note = phosphorothioate linkage
  misc_feature 1..19: note = At this position backbone is RNA
  misc_feature 21..33: note = At this position backbone is RNA

SEQ ID NO: 272 - DNA, 33 bp, synthetic construct; identical to SEQ ID NO: 191
  misc_feature 1..33: note = Description of sequence: bifunctional oligonucleotide
  source 1..33: mol_type = other DNA
  modified_base 1: mod_base = gm
  modified_base 2: mod_base = cm
  modified_base 3: mod_base = cm
  modified_base 4: mod_base = OTHER; note = 2'O-methyl-adenosine
  modified_base 5: mod_base = gm
  modified_base 6: mod_base = gm
  modified_base 7: mod_base = um
  modified_base 8: mod_base = OTHER; note = 2'O-methyl-adenosine
  modified_base 9: mod_base = OTHER; note = 2'O-methyl-adenosine
  modified_base 10: mod_base = gm
  modified_base 11: mod_base = um
  modified_base 12: mod_base = OTHER; note = 2'O-methyl-adenosine
  modified_base 13: mod_base = um
  modified_base 14: mod_base = um
  modified_base 15: mod_base = cm
  modified_base 16: mod_base = OTHER; note = locked nucleic acid
  modified_base 17: mod_base = gm
  modified_base 18: mod_base = cm
  modified_base 19: mod_base = um
  modified_base 20: mod_base = OTHER; note = locked nucleic acid
  modified_base 21: mod_base = um
  modified_base 22: mod_base = um
  modified_base 23: mod_base = cm
  modified_base 24: mod_base = OTHER; note = locked nucleic acid
  modified_base 25: mod_base = OTHER; note = 2'O-methyl-adenosine
  modified_base 26: mod_base = gm
  modified_base 27: mod_base = gm
  modified_base 28: mod_base = OTHER; note = locked nucleic acid
  modified_base 29: mod_base = um
  modified_base 30: mod_base = cm
  modified_base 31: mod_base = gm
  modified_base 32: mod_base = OTHER; note = locked nucleic acid
  modified_base 33: mod_base = cm
  misc_feature 29^30: note = phosphorothioate linkage
  misc_feature 30^31: note = phosphorothioate linkage
  misc_feature 31^32: note = phosphorothioate linkage
  misc_feature 32^33: note = phosphorothioate linkage
  misc_feature 1..19: note = At this position backbone is RNA
  misc_feature 21..33: note = At this position backbone is RNA

SEQ ID NO: 273 - DNA, 33 bp, synthetic construct; identical to SEQ ID NO: 191
  misc_feature 1..33: note = Description of sequence: bifunctional oligonucleotide
  source 1..33: mol_type = other DNA
  modified_base 1: mod_base = gm
  modified_base 2: mod_base = cm
  modified_base 3: mod_base = cm
  modified_base 4: mod_base = OTHER; note = 2'O-methyl-adenosine
  modified_base 5: mod_base = gm
  modified_base 6: mod_base = gm
  modified_base 7: mod_base = um
  modified_base 8: mod_base = OTHER; note = 2'O-methyl-adenosine
  modified_base 9: mod_base = OTHER; note = 2'O-methyl-adenosine
  modified_base 10: mod_base = gm
  modified_base 11: mod_base = um
  modified_base 12: mod_base = OTHER; note = 2'O-methyl-adenosine
  modified_base 13: mod_base = um
  modified_base 14: mod_base = um
  modified_base 15: mod_base = cm
  modified_base 16: mod_base = OTHER; note = locked nucleic acid
  modified_base 17: mod_base = gm
  modified_base 18: mod_base = cm
  modified_base 19: mod_base = um
  modified_base 20: mod_base = OTHER; note = locked nucleic acid
  modified_base 21: mod_base = um
  modified_base 22: mod_base = um
  modified_base 23: mod_base = cm
  modified_base 24: mod_base = OTHER; note = locked nucleic acid
  modified_base 25: mod_base = OTHER; note = 2'O-methyl-adenosine
  modified_base 26: mod_base = gm
  modified_base 27: mod_base = gm
  modified_base 28: mod_base = OTHER; note = locked nucleic acid
  modified_base 29: mod_base = um
  modified_base 30: mod_base = cm
  modified_base 31: mod_base = gm
  modified_base 32: mod_base = OTHER; note = locked nucleic acid
  modified_base 33: mod_base = cm
  misc_feature 1^2: note = phosphorothioate linkage
  misc_feature 2^3: note = phosphorothioate linkage
  misc_feature 3^4: note = phosphorothioate linkage
  misc_feature 4^5: note = phosphorothioate linkage
  misc_feature 29^30: note = phosphorothioate linkage
  misc_feature 30^31: note = phosphorothioate linkage
  misc_feature 31^32: note = phosphorothioate linkage
  misc_feature 32^33: note = phosphorothioate linkage
  misc_feature 1..19: note = At this position backbone is RNA
  misc_feature 21..33: note = At this position backbone is RNA

SEQ ID NO: 274 - DNA, 33 bp, synthetic construct; identical to SEQ ID NO: 191
  misc_feature 1..33: note = Description of sequence: bifunctional oligonucleotide
  source 1..33: mol_type = other DNA
  modified_base 1: mod_base = gm
  modified_base 2: mod_base = cm
  modified_base 3: mod_base = cm
  modified_base 4: mod_base = OTHER; note = 2'O-methyl-adenosine
  modified_base 5: mod_base = gm
  modified_base 6: mod_base = gm
  modified_base 7: mod_base = um
  modified_base 8: mod_base = OTHER; note = 2'O-methyl-adenosine
  modified_base 9: mod_base = OTHER; note = 2'O-methyl-adenosine
  modified_base 10: mod_base = gm
  modified_base 11: mod_base = um
  modified_base 12: mod_base = OTHER; note = 2'O-methyl-adenosine
  modified_base 13: mod_base = um
  modified_base 14: mod_base = OTHER; note = 2'-o-methoxy-ethyl thymidine
  modified_base 15: mod_base = OTHER; note = 2'-O-methoxy-ethyl cytidine
  modified_base 16: mod_base = OTHER; note = locked nucleic acid
  modified_base 17: mod_base = OTHER; note = 2'-O-methoxy-ethyl guanosine
  modified_base 18: mod_base = OTHER; note = 2'-O-methoxy-ethyl cytidine
  modified_base 19: mod_base = OTHER; note = 2'-o-methoxy-ethyl thymidine
  modified_base 20: mod_base = OTHER; note = locked nucleic acid
  modified_base 21: mod_base = OTHER; note = 2'-o-methoxy-ethyl thymidine
  modified_base 22: mod_base = OTHER; note = 2'-o-methoxy-ethyl thymidine
  modified_base 23: mod_base = OTHER; note = 2'-O-methoxy-ethyl cytidine
  modified_base 24: mod_base = OTHER; note = locked nucleic acid
  modified_base 25: mod_base = OTHER; note = 2'-O-methoxy-ethyl adenosine
  modified_base 26: mod_base = OTHER; note = 2'-O-methoxy-ethyl guanosine
  modified_base 27: mod_base = OTHER; note = 2'-O-methoxy-ethyl guanosine
  modified_base 28: mod_base = OTHER; note = locked nucleic acid
  modified_base 29: mod_base = OTHER; note = 2'-o-methoxy-ethyl thymidine
  modified_base 30: mod_base = OTHER; note = 2'-O-methoxy-ethyl cytidine
  modified_base 31: mod_base = OTHER; note = 2'-O-methoxy-ethyl guanosine
  modified_base 32: mod_base = OTHER; note = locked nucleic acid
  modified_base 33: mod_base = OTHER; note = 2', 3'-O-methoxy ethyl cytidine
  misc_feature 29^30: note = phosphorothioate linkage
  misc_feature 30^31: note = phosphorothioate linkage
  misc_feature 31^32: note = phosphorothioate linkage
  misc_feature 32^33: note = phosphorothioate linkage
  misc_feature 1..19: note = At this position backbone is RNA
  misc_feature 21..33: note = At this position backbone is RNA

SEQ ID NO: 275 - DNA, 33 bp, synthetic construct; identical to SEQ ID NO: 191
  misc_feature 1..33: note = Description of sequence: bifunctional oligonucleotide
  source 1..33: mol_type = other DNA
  modified_base 1: mod_base = gm
  modified_base 2: mod_base = cm
  modified_base 3: mod_base = cm
  modified_base 4: mod_base = OTHER; note = 2'O-methyl-adenosine
  modified_base 5: mod_base = gm
  modified_base 6: mod_base = gm
  modified_base 7: mod_base = um
  modified_base 8: mod_base = OTHER; note = 2'O-methyl-adenosine
  modified_base 9: mod_base = OTHER; note = 2'O-methyl-adenosine
  modified_base 10: mod_base = gm
  modified_base 11: mod_base = um
  modified_base 12: mod_base = OTHER; note = 2'O-methyl-adenosine
  modified_base 13: mod_base = um
  modified_base 14: mod_base = OTHER; note = 2'-o-methoxy-ethyl thymidine
  modified_base 15: mod_base = OTHER; note = 2'-O-methoxy-ethyl cytidine
  modified_base 16: mod_base = OTHER; note = locked nucleic acid
  modified_base 17: mod_base = OTHER; note = 2'-O-methoxy-ethyl guanosine
  modified_base 18: mod_base = OTHER; note = 2'-O-methoxy-ethyl cytidine
  modified_base 19: mod_base = OTHER; note = 2'-o-methoxy-ethyl thymidine
  modified_base 20: mod_base = OTHER; note = locked nucleic acid
  modified_base 21: mod_base = OTHER; note = 2'-o-methoxy-ethyl thymidine
  modified_base 22: mod_base = OTHER; note = 2'-o-methoxy-ethyl thymidine
  modified_base 23: mod_base = OTHER; note = 2'-O-methoxy-ethyl cytidine
  modified_base 24: mod_base = OTHER; note = locked nucleic acid
  modified_base 25: mod_base = OTHER; note = 2'-O-methoxy-ethyl adenosine
  modified_base 26: mod_base = OTHER; note = 2'-O-methoxy-ethyl guanosine
  modified_base 27: mod_base = OTHER; note = 2'-O-methoxy-ethyl guanosine
  modified_base 28: mod_base = OTHER; note = locked nucleic acid
  modified_base 29: mod_base = OTHER; note = 2'-o-methoxy-ethyl thymidine
  modified_base 30: mod_base = OTHER; note = 2'-O-methoxy-ethyl cytidine
  modified_base 31: mod_base = OTHER; note = 2'-O-methoxy-ethyl guanosine
  modified_base 32: mod_base = OTHER; note = locked nucleic acid
  modified_base 33: mod_base = OTHER; note = 2', 3'-O-methoxy ethyl cytidine
  misc_feature 1^2: note = phosphorothioate linkage
  misc_feature 2^3: note = phosphorothioate linkage
  misc_feature 3^4: note = phosphorothioate linkage
  misc_feature 4^5: note = phosphorothioate linkage
  misc_feature 29^30: note = phosphorothioate linkage
  misc_feature 30^31: note = phosphorothioate linkage
  misc_feature 31^32: note = phosphorothioate linkage
  misc_feature 32^33: note = phosphorothioate linkage
  misc_feature 1..19: note = At this position backbone is RNA
  misc_feature 21..33: note = At this position backbone is RNA

SEQ ID NO: 276 - DNA, 33 bp, synthetic construct; identical to SEQ ID NO: 191
  misc_feature 1..33: note = Description of sequence: bifunctional oligonucleotide
  source 1..33: mol_type = other DNA
  modified_base 1: mod_base = OTHER; note = 2', 5'-O-methoxy ethyl guanosine
  modified_base 2: mod_base = OTHER; note = locked nucleic acid
  modified_base 3: mod_base = OTHER; note = 2'-O-methoxy-ethyl cytidine
  modified_base 4: mod_base = OTHER; note = locked nucleic acid
  modified_base 5: mod_base = OTHER; note = 2'-O-methoxy-ethyl guanosine
  modified_base 6: mod_base = OTHER; note = locked nucleic acid
  modified_base 7: mod_base = OTHER; note = 2'-o-methoxy-ethyl thymidine
  modified_base 8: mod_base = OTHER; note = locked nucleic acid
  modified_base 9: mod_base = OTHER; note = 2'-O-methoxy-ethyl adenosine
  modified_base 10: mod_base = OTHER; note = locked nucleic acid
  modified_base 11: mod_base = OTHER; note = 2'-o-methoxy-ethyl thymidine
  modified_base 12: mod_base = OTHER; note = 2'-O-methoxy-ethyl adenosine
  modified_base 13: mod_base = OTHER; note = 2'-o-methoxy-ethyl thymidine
  modified_base 14: mod_base = um
  modified_base 15: mod_base = cm
  modified_base 16: mod_base = OTHER; note = locked nucleic acid
  modified_base 17: mod_base = gm
  modified_base 18: mod_base = cm
  modified_base 19: mod_base = um
  modified_base 20: mod_base = OTHER; note = locked nucleic acid
  modified_base 21: mod_base = um
  modified_base 22: mod_base = um
  modified_base 23: mod_base = cm
  modified_base 24: mod_base = OTHER; note = locked nucleic acid
  modified_base 25: mod_base = OTHER; note = 2'O-methyl-adenosine
  modified_base 26: mod_base = gm
  modified_base 27: mod_base = gm
  modified_base 28: mod_base = OTHER; note = locked nucleic acid
  modified_base 29: mod_base = um
  modified_base 30: mod_base = cm
  modified_base 31: mod_base = gm
  modified_base 32: mod_base = OTHER; note = locked nucleic acid
  modified_base 33: mod_base = cm
  misc_feature 1^2: note = phosphorothioate linkage
  misc_feature 2^3: note = phosphorothioate linkage
  misc_feature 3^4: note = phosphorothioate linkage
  misc_feature 4^5: note = phosphorothioate linkage
  misc_feature 1..19: note = At this position backbone is RNA
  misc_feature 21..33: note = At this position backbone is RNA

SEQ ID NO: 277 - DNA, 33 bp, synthetic construct; identical to SEQ ID NO: 191
  misc_feature 1..33: note = Description of sequence: bifunctional oligonucleotide
  source 1..33: mol_type = other DNA
  modified_base 1: mod_base = OTHER; note = 2', 5'-O-methoxy ethyl guanosine
  modified_base 2: mod_base = OTHER; note = locked nucleic acid
  modified_base 3: mod_base = OTHER; note = 2'-O-methoxy-ethyl cytidine
  modified_base 4: mod_base = OTHER; note = locked nucleic acid
  modified_base 5: mod_base = OTHER; note = 2'-O-methoxy-ethyl guanosine
  modified_base 6: mod_base = OTHER; note = locked nucleic acid
  modified_base 7: mod_base = OTHER; note = 2'-o-methoxy-ethyl thymidine
  modified_base 8: mod_base = OTHER; note = locked nucleic acid
  modified_base 9: mod_base = OTHER; note = 2'-O-methoxy-ethyl adenosine
  modified_base 10: mod_base = OTHER; note = locked nucleic acid
  modified_base 11: mod_base = OTHER; note = 2'-o-methoxy-ethyl thymidine
  modified_base 12: mod_base = OTHER; note = 2'-O-methoxy-ethyl adenosine
  modified_base 13: mod_base = OTHER; note = 2'-o-methoxy-ethyl thymidine
  modified_base 14: mod_base = um
  modified_base 15: mod_base = cm
  modified_base 16: mod_base = OTHER; note = locked nucleic acid
  modified_base 17: mod_base = gm
  modified_base 18: mod_base = cm
  modified_base 19: mod_base = um
  modified_base 20: mod_base = OTHER; note = locked nucleic acid
  modified_base 21: mod_base = um
  modified_base 22: mod_base = um
  modified_base 23: mod_base = cm
  modified_base 24: mod_base = OTHER; note = locked nucleic acid
  modified_base 25: mod_base = OTHER; note = 2'O-methyl-adenosine
  modified_base 26: mod_base = gm
  modified_base 27: mod_base = gm
  modified_base 28: mod_base = OTHER; note = locked nucleic acid
  modified_base 29: mod_base = um
  modified_base 30: mod_base = cm
  modified_base 31: mod_base = gm
  modified_base 32: mod_base = OTHER; note = locked nucleic acid
  modified_base 33: mod_base = cm
  misc_feature 1^2: note = phosphorothioate linkage
  misc_feature 2^3: note = phosphorothioate linkage
  misc_feature 3^4: note = phosphorothioate linkage
  misc_feature 4^5: note = phosphorothioate linkage
  misc_feature 29^30: note = phosphorothioate linkage
  misc_feature 30^31: note = phosphorothioate linkage
  misc_feature 31^32: note = phosphorothioate linkage
  misc_feature 32^33: note = phosphorothioate linkage
  misc_feature 1..19: note = At this position backbone is RNA
  misc_feature 21..33: note = At this position backbone is RNA

SEQ ID NO: 278 - DNA, 33 bp, synthetic construct; identical to SEQ ID NO: 191
  misc_feature 1..33: note = Description of sequence: bifunctional oligonucleotide
  source 1..33: mol_type = other DNA
  modified_base 1: mod_base = OTHER; note = 2', 5'-O-methoxy ethyl guanosine
  modified_base 2: mod_base = OTHER; note = locked nucleic acid
  modified_base 3: mod_base = OTHER; note = 2'-O-methoxy-ethyl cytidine
  modified_base 4: mod_base = OTHER; note = locked nucleic acid
  modified_base 5: mod_base = OTHER; note = 2'-O-methoxy-ethyl guanosine
  modified_base 6: mod_base = OTHER; note = locked nucleic acid
  modified_base 7: mod_base = OTHER; note = 2'-o-methoxy-ethyl thymidine
  modified_base 8: mod_base = OTHER; note = locked nucleic acid
  modified_base 9: mod_base = OTHER; note = 2'-O-methoxy-ethyl adenosine
  modified_base 10: mod_base = OTHER; note = locked nucleic acid
  modified_base 11: mod_base = OTHER; note = 2'-o-methoxy-ethyl thymidine
  modified_base 12: mod_base = OTHER; note = 2'-O-methoxy-ethyl adenosine
  modified_base 13: mod_base = OTHER; note = 2'-o-methoxy-ethyl thymidine
  modified_base 14: mod_base = OTHER; note = 2'-o-methoxy-ethyl thymidine
  modified_base 15: mod_base = OTHER; note = 2'-O-methoxy-ethyl cytidine
  modified_base 16: mod_base = OTHER; note = locked nucleic acid
  modified_base 17: mod_base = OTHER; note = 2'-O-methoxy-ethyl guanosine
  modified_base 18: mod_base = OTHER; note = 2'-O-methoxy-ethyl cytidine
  modified_base 19: mod_base = OTHER; note = 2'-o-methoxy-ethyl thymidine
  modified_base 20: mod_base = OTHER; note = locked nucleic acid
  modified_base 21: mod_base = OTHER; note = 2'-o-methoxy-ethyl thymidine
  modified_base 22: mod_base = OTHER; note = 2'-o-methoxy-ethyl thymidine
  modified_base 23: mod_base = OTHER; note = 2'-O-methoxy-ethyl cytidine
  modified_base 24: mod_base = OTHER; note = locked nucleic acid
  modified_base 25: mod_base = OTHER; note = 2'-O-methoxy-ethyl adenosine
  modified_base 26: mod_base = OTHER; note = 2'-O-methoxy-ethyl guanosine
  modified_base 27: mod_base = OTHER; note = 2'-O-methoxy-ethyl guanosine
  modified_base 28: mod_base = OTHER; note = locked nucleic acid
  modified_base 29: mod_base = OTHER; note = 2'-o-methoxy-ethyl thymidine
  modified_base 30: mod_base = OTHER; note = 2'-O-methoxy-ethyl cytidine
  modified_base 31: mod_base = OTHER; note = 2'-O-methoxy-ethyl guanosine
  modified_base 32: mod_base = OTHER; note = locked nucleic acid
  modified_base 33: mod_base = OTHER; note = 2', 3'-O-methoxy ethyl cytidine
  misc_feature 1^2: note = phosphorothioate linkage
  misc_feature 2^3: note = phosphorothioate linkage
  misc_feature 3^4: note = phosphorothioate linkage
  misc_feature 4^5: note = phosphorothioate linkage
  misc_feature 29^30: note = phosphorothioate linkage
  misc_feature 30^31: note = phosphorothioate linkage
  misc_feature 31^32: note = phosphorothioate linkage
  misc_feature 32^33: note = phosphorothioate linkage
  misc_feature 1..19: note = At this position backbone is RNA
  misc_feature 21..33: note = At this position backbone is RNA

SEQ ID NO: 279 - DNA, 33 bp, synthetic construct; identical to SEQ ID NO: 218
  misc_feature 1..33: note = Description of sequence: bifunctional oligonucleotide
  source 1..33: mol_type = other DNA
  modified_base 1: mod_base = gm
  modified_base 2: mod_base = cm
  modified_base 3: mod_base = cm
  modified_base 4: mod_base = OTHER; note = 2'O-methyl-adenosine
  modified_base 5: mod_base = gm
  modified_base 6: mod_base = gm
  modified_base 7: mod_base = um
  modified_base 8: mod_base = OTHER; note = 2'O-methyl-adenosine
  modified_base 9: mod_base = OTHER; note = 2'O-methyl-adenosine
  modified_base 10: mod_base = gm
  modified_base 11: mod_base = um
  modified_base 12: mod_base = OTHER; note = 2'O-methyl-adenosine
  modified_base 13: mod_base = um
  modified_base 14: mod_base = OTHER; note = 2'O-methyl-adenosine
  modified_base 15: mod_base = OTHER; note = 2'O-methyl-adenosine
  modified_base 16: mod_base = OTHER; note = locked nucleic acid
  modified_base 17: mod_base = gm
  modified_base 18: mod_base = OTHER; note = 2'O-methyl-adenosine
  modified_base 19: mod_base = cm
  modified_base 20: mod_base = OTHER; note = locked nucleic acid
  modified_base 21: mod_base = um
  modified_base 22: mod_base = gm
  modified_base 23: mod_base = OTHER; note = 2'O-methyl-adenosine
  modified_base 24: mod_base = OTHER; note = locked nucleic acid
  modified_base 25: mod_base = gm
  modified_base 26: mod_base = gm
  modified_base 27: mod_base = OTHER; note = 2'O-methyl-adenosine
  modified_base 28: mod_base = OTHER; note = locked nucleic acid
  modified_base 29: mod_base = um
  modified_base 30: mod_base = cm
  modified_base 31: mod_base = gm
  modified_base 32: mod_base = OTHER; note = locked nucleic acid
  modified_base 33: mod_base = OTHER; note = 2'O-methyl-adenosine
  misc_feature 1^2: note = phosphorothioate linkage
  misc_feature 2^3: note = phosphorothioate linkage
  misc_feature 3^4: note = phosphorothioate linkage
  misc_feature 4^5: note = phosphorothioate linkage
  misc_feature 1..19: note = At this position backbone is RNA
  misc_feature 21..33: note = At this position backbone is RNA

SEQ ID NO: 280 - DNA, 33 bp, synthetic construct; identical to SEQ ID NO: 218
  misc_feature 1..33: note = Description of sequence: bifunctional oligonucleotide
  source 1..33: mol_type = other DNA
  modified_base 1: mod_base = gm
  modified_base 2: mod_base = cm
  modified_base 3: mod_base = cm
  modified_base 4: mod_base = OTHER; note = 2'O-methyl-adenosine
  modified_base 5: mod_base = gm
  modified_base 6: mod_base = gm
  modified_base 7: mod_base = um
  modified_base 8: mod_base = OTHER; note = 2'O-methyl-adenosine
  modified_base 9: mod_base = OTHER; note = 2'O-methyl-adenosine
  modified_base 10: mod_base = gm
  modified_base 11: mod_base = um
  modified_base 12: mod_base = OTHER; note = 2'O-methyl-adenosine
  modified_base 13: mod_base = um
  modified_base 14: mod_base = OTHER; note = 2'O-methyl-adenosine
  modified_base 15: mod_base = OTHER; note = 2'O-methyl-adenosine
  modified_base 16: mod_base = OTHER; note = locked nucleic acid
  modified_base 17: mod_base = gm
  modified_base 18: mod_base = OTHER; note = 2'O-methyl-adenosine
  modified_base 19: mod_base = cm
  modified_base 20: mod_base = OTHER; note = locked nucleic acid
  modified_base 21: mod_base = um
  modified_base 22: mod_base = gm
  modified_base 23: mod_base = OTHER; note = 2'O-methyl-adenosine
  modified_base 24: mod_base = OTHER; note = locked nucleic acid
  modified_base 25: mod_base = gm
  modified_base 26: mod_base = gm
  modified_base 27: mod_base = OTHER; note = 2'O-methyl-adenosine
  modified_base 28: mod_base = OTHER; note = locked nucleic acid
  modified_base 29: mod_base = um
  modified_base 30: mod_base = cm
  modified_base 31: mod_base = gm
  modified_base 32: mod_base = OTHER; note = locked nucleic acid
  modified_base 33: mod_base = OTHER; note = 2'O-methyl-adenosine
  misc_feature 29^30: note = phosphorothioate linkage
  misc_feature 30^31: note = phosphorothioate linkage
  misc_feature 31^32: note = phosphorothioate linkage
  misc_feature 32^33: note = phosphorothioate linkage
  misc_feature 1..19: note = At this position backbone is RNA
  misc_feature 21..33: note = At this position backbone is RNA

SEQ ID NO: 281 - DNA, 33 bp, synthetic construct; identical to SEQ ID NO: 218
  misc_feature 1..33: note = Description of sequence: bifunctional oligonucleotide
  source 1..33: mol_type = other DNA
  modified_base 1: mod_base = gm
  modified_base 2: mod_base = cm
  modified_base 3: mod_base = cm
  modified_base 4: mod_base = OTHER; note = 2'O-methyl-adenosine
  modified_base 5: mod_base = gm
  modified_base 6: mod_base = gm
  modified_base 7: mod_base = um
  modified_base 8: mod_base = OTHER; note = 2'O-methyl-adenosine
  modified_base 9: mod_base = OTHER; note = 2'O-methyl-adenosine
  modified_base 10: mod_base = gm
  modified_base 11: mod_base = um
  modified_base 12: mod_base = OTHER; note = 2'O-methyl-adenosine
  modified_base 13: mod_base = um
  modified_base 14: mod_base = OTHER; note = 2'O-methyl-adenosine
  modified_base 15: mod_base = OTHER; note = 2'O-methyl-adenosine
  modified_base 16: mod_base = OTHER; note = locked nucleic acid
  modified_base 17: mod_base = gm
  modified_base 18: mod_base = OTHER; note = 2'O-methyl-adenosine
  modified_base 19: mod_base = cm
  modified_base 20: mod_base = OTHER; note = locked nucleic acid
  modified_base 21: mod_base = um
  modified_base 22: mod_base = gm
  modified_base 23: mod_base = OTHER; note = 2'O-methyl-adenosine
  modified_base 24: mod_base = OTHER; note = locked nucleic acid
  modified_base 25: mod_base = gm
  modified_base 26: mod_base = gm
  modified_base 27: mod_base = OTHER; note = 2'O-methyl-adenosine
  modified_base 28: mod_base = OTHER; note = locked nucleic acid
  modified_base 29: mod_base = um
  modified_base 30: mod_base = cm
  modified_base 31: mod_base = gm
  modified_base 32: mod_base = OTHER; note = locked nucleic acid
  modified_base 33: mod_base = OTHER; note = 2'O-methyl-adenosine
  misc_feature 1^2: note = phosphorothioate linkage
  misc_feature 2^3: note = phosphorothioate linkage
  misc_feature 3^4: note = phosphorothioate linkage
  misc_feature 4^5: note = phosphorothioate linkage
  misc_feature 29^30: note = phosphorothioate linkage
  misc_feature 30^31: note = phosphorothioate linkage
  misc_feature 31^32: note = phosphorothioate linkage
  misc_feature 32^33: note = phosphorothioate linkage
  misc_feature 1..19: note = At this position backbone is RNA
  misc_feature 21..33: note = At this position backbone is RNA

SEQ ID NO: 282 - DNA, 33 bp, synthetic construct; identical to SEQ ID NO: 218
  misc_feature 1..33: note = Description of sequence: bifunctional oligonucleotide
  source 1..33: mol_type = other DNA
  modified_base 1: mod_base = gm
  modified_base 2: mod_base = cm
  modified_base 3: mod_base = cm
  modified_base 4: mod_base = OTHER; note = 2'O-methyl-adenosine
  modified_base 5: mod_base = gm
  modified_base 6: mod_base = gm
  modified_base 7: mod_base = um
  modified_base 8: mod_base = OTHER; note = 2'O-methyl-adenosine
  modified_base 9: mod_base = OTHER; note = 2'O-methyl-adenosine
  modified_base 10: mod_base = gm
  modified_base 11: mod_base = um
  modified_base 12: mod_base = OTHER; note = 2'O-methyl-adenosine
  modified_base 13: mod_base = um
  modified_base 14: mod_base = OTHER; note = 2'-O-methoxy-ethyl adenosine
  modified_base 15: mod_base = OTHER; note = 2'-O-methoxy-ethyl adenosine
  modified_base 16: mod_base = OTHER; note = locked nucleic acid
  modified_base 17: mod_base = OTHER; note = 2'-O-methoxy-ethyl guanosine
  modified_base 18: mod_base = OTHER; note = 2'-O-methoxy-ethyl adenosine
  modified_base 19: mod_base = OTHER; note = 2'-O-methoxy-ethyl cytidine
  modified_base 20: mod_base = OTHER; note = locked nucleic acid
  modified_base 21: mod_base = OTHER; note = 2'-o-methoxy-ethyl thymidine
  modified_base 22: mod_base = OTHER; note = 2'-O-methoxy-ethyl guanosine
  modified_base 23: mod_base = OTHER; note = 2'-O-methoxy-ethyl adenosine
  modified_base 24: mod_base = OTHER; note = locked nucleic acid
  modified_base 25: mod_base = OTHER; note = 2'-O-methoxy-ethyl guanosine
  modified_base 26: mod_base = OTHER; note = 2'-O-methoxy-ethyl guanosine
  modified_base 27: mod_base = OTHER; note = 2'-O-methoxy-ethyl adenosine
  modified_base 28: mod_base = OTHER; note = locked nucleic acid
  modified_base 29: mod_base = OTHER; note = 2'-o-methoxy-ethyl thymidine
  modified_base 30: mod_base = OTHER; note = 2'-O-methoxy-ethyl cytidine
  modified_base 31: mod_base = OTHER; note = 2'-O-methoxy-ethyl guanosine
  modified_base 32: mod_base = OTHER; note = locked nucleic acid
  modified_base 33: mod_base = OTHER; note = 2', 3'-O-methoxy ethyl adenosine
  misc_feature 29^30: note = phosphorothioate linkage
  misc_feature 30^31: note = phosphorothioate linkage
  misc_feature 31^32: note = phosphorothioate linkage
  misc_feature 32^33: note = phosphorothioate linkage
  misc_feature 1..19: note = At this position backbone is RNA
  misc_feature 21..33: note = At this position backbone is RNA

SEQ ID NO: 283 - DNA, 33 bp, synthetic construct; identical to SEQ ID NO: 218
  misc_feature 1..33: note = Description of sequence: bifunctional oligonucleotide
  source 1..33: mol_type = other DNA
  modified_base 1: mod_base = gm
  modified_base 2: mod_base = cm
  modified_base 3: mod_base = cm
  modified_base 4: mod_base = OTHER; note = 2'O-methyl-adenosine
  modified_base 5: mod_base = gm
  modified_base 6: mod_base = gm
  modified_base 7: mod_base = um
  modified_base 8: mod_base = OTHER; note = 2'O-methyl-adenosine
  modified_base 9: mod_base = OTHER; note = 2'O-methyl-adenosine
  modified_base 10: mod_base = gm
  modified_base 11: mod_base = um
  modified_base 12: mod_base = OTHER; note = 2'O-methyl-adenosine
  modified_base 13: mod_base = um
  modified_base 14: mod_base = OTHER; note = 2'-O-methoxy-ethyl adenosine
  modified_base 15: mod_base = OTHER; note = 2'-O-methoxy-ethyl adenosine
  modified_base 16: mod_base = OTHER; note = locked nucleic acid
  modified_base 17: mod_base = OTHER; note = 2'-O-methoxy-ethyl guanosine
  modified_base 18: mod_base = OTHER; note = 2'-O-methoxy-ethyl adenosine
  modified_base 19: mod_base = OTHER; note = 2'-O-methoxy-ethyl cytidine
  modified_base 20: mod_base = OTHER; note = locked nucleic acid
  modified_base 21: mod_base = OTHER; note = 2'-o-methoxy-ethyl thymidine
  modified_base 22: mod_base = OTHER; note = 2'-O-methoxy-ethyl guanosine
  modified_base 23: mod_base = OTHER; note = 2'-O-methoxy-ethyl adenosine
  modified_base 24: mod_base = OTHER; note = locked nucleic acid
  modified_base 25: mod_base = OTHER; note = 2'-O-methoxy-ethyl guanosine
  modified_base 26: mod_base = OTHER; note = 2'-O-methoxy-ethyl guanosine
  modified_base 27: mod_base = OTHER; note = 2'-O-methoxy-ethyl adenosine
  modified_base 28: mod_base = OTHER; note = locked nucleic acid
  modified_base 29: mod_base = OTHER; note = 2'-o-methoxy-ethyl thymidine
  modified_base 30: mod_base = OTHER; note = 2'-O-methoxy-ethyl cytidine
  modified_base 31: mod_base = OTHER; note = 2'-O-methoxy-ethyl guanosine
  modified_base 32: mod_base = OTHER; note = locked nucleic acid
  modified_base 33: mod_base = OTHER; note = 2', 3'-O-methoxy ethyl adenosine
  misc_feature 1^2: note = phosphorothioate linkage
  misc_feature 2^3: note = phosphorothioate linkage
  misc_feature 3^4: note = phosphorothioate linkage
  misc_feature 4^5: note = phosphorothioate linkage
  misc_feature 29^30: note = phosphorothioate linkage
  misc_feature 30^31: note = phosphorothioate linkage
  misc_feature 31^32: note = phosphorothioate linkage
  misc_feature 32^33: note = phosphorothioate linkage
  misc_feature 1..19: note = At this position backbone is RNA
  misc_feature 21..33: note = At this position backbone is RNA

SEQ ID NO: 284 - DNA, 33 bp, synthetic construct; identical to SEQ ID NO: 218
  misc_feature 1..33: note = Description of sequence: bifunctional oligonucleotide
  source 1..33: mol_type = other DNA
  modified_base 1: mod_base = OTHER; note = 2', 5'-O-methoxy ethyl guanosine
  modified_base 2: mod_base = OTHER; note = locked nucleic acid
  modified_base 3: mod_base = OTHER; note = 2'-O-methoxy-ethyl cytidine
  modified_base 4: mod_base = OTHER; note = locked nucleic acid
  modified_base 5: mod_base = OTHER; note = 2'-O-methoxy-ethyl guanosine
  modified_base 6: mod_base = OTHER; note = locked nucleic acid
  modified_base 7: mod_base = OTHER; note = 2'-o-methoxy-ethyl thymidine
  modified_base 8: mod_base = OTHER; note = locked nucleic acid
  modified_base 9: mod_base = OTHER; note = 2'-O-methoxy-ethyl adenosine
  modified_base 10: mod_base = OTHER; note = locked nucleic acid
  modified_base 11: mod_base = OTHER; note = 2'-o-methoxy-ethyl thymidine
  modified_base 12: mod_base = OTHER; note = 2'-O-methoxy-ethyl adenosine
  modified_base 13: mod_base = OTHER; note = 2'-o-methoxy-ethyl thymidine
  modified_base 14: mod_base = OTHER; note = 2'O-methyl-adenosine
  modified_base 15: mod_base = OTHER; note = 2'O-methyl-adenosine
  modified_base 16: mod_base = OTHER; note = locked nucleic acid
  modified_base 17: mod_base = gm
  modified_base 18: mod_base = OTHER; note = 2'O-methyl-adenosine
  modified_base 19: mod_base = cm
  modified_base 20: mod_base = OTHER; note = locked nucleic acid
  modified_base 21: mod_base = um
  modified_base 22: mod_base = gm
  modified_base 23: mod_base = OTHER; note = 2'O-methyl-adenosine
  modified_base 24: mod_base = OTHER; note = locked nucleic acid
  modified_base 25: mod_base = gm
  modified_base 26: mod_base = gm
  modified_base 27: mod_base = OTHER; note = 2'O-methyl-adenosine
  modified_base 28: mod_base = OTHER; note = locked nucleic acid
  modified_base 29: mod_base = um
  modified_base 30: mod_base = cm
  modified_base 31: mod_base = gm
  modified_base 32: mod_base = OTHER; note = locked nucleic acid
  modified_base 33: mod_base = OTHER; note = 2'O-methyl-adenosine
  misc_feature 1^2: note = phosphorothioate linkage
  misc_feature 2^3: note = phosphorothioate linkage
  misc_feature 3^4: note = phosphorothioate linkage
  misc_feature 4^5: note = phosphorothioate linkage
  misc_feature 1..19: note = At this position backbone is RNA
  misc_feature 21..33: note = At this position backbone is RNA

SEQ ID NO: 285 - DNA, 33 bp, synthetic construct; identical to SEQ ID NO: 218
  misc_feature 1..33: note = Description of sequence: bifunctional oligonucleotide
  source 1..33: mol_type = other DNA
  modified_base 1: mod_base = OTHER; note = 2', 5'-O-methoxy ethyl guanosine
  modified_base 2: mod_base = OTHER; note = locked nucleic acid
  modified_base 3: mod_base = OTHER; note = 2'-O-methoxy-ethyl cytidine
  modified_base 4: mod_base = OTHER; note = locked nucleic acid
  modified_base 5: mod_base = OTHER; note = 2'-O-methoxy-ethyl guanosine
  modified_base 6: mod_base = OTHER; note = locked nucleic acid
  modified_base 7: mod_base = OTHER; note = 2'-o-methoxy-ethyl thymidine
  modified_base 8: mod_base = OTHER; note = locked nucleic acid
  modified_base 9: mod_base = OTHER; note = 2'-O-methoxy-ethyl adenosine
  modified_base 10: mod_base = OTHER; note = locked nucleic acid
  modified_base 11: mod_base = OTHER; note = 2'-o-methoxy-ethyl thymidine
  modified_base 12: mod_base = OTHER; note = 2'-O-methoxy-ethyl adenosine
  modified_base 13: mod_base = OTHER; note = 2'-o-methoxy-ethyl thymidine
  modified_base 14: mod_base = OTHER; note = 2'O-methyl-adenosine
  modified_base 15: mod_base = OTHER; note = 2'O-methyl-adenosine
  modified_base 16: mod_base = OTHER; note = locked nucleic acid
  modified_base 17: mod_base = gm
  modified_base 18: mod_base = OTHER; note = 2'O-methyl-adenosine
  modified_base 19: mod_base = cm
  modified_base 20: mod_base = OTHER; note = locked nucleic acid
  modified_base 21: mod_base = um
  modified_base 22: mod_base = gm
  modified_base 23: mod_base = OTHER; note = 2'O-methyl-adenosine
  modified_base 24: mod_base = OTHER; note = locked nucleic acid
  modified_base 25: mod_base = gm
  modified_base 26: mod_base = gm
  modified_base 27: mod_base = OTHER; note = 2'O-methyl-adenosine
  modified_base 28: mod_base = OTHER; note = locked nucleic acid
  modified_base 29: mod_base = um
  modified_base 30: mod_base = cm
  modified_base 31: mod_base = gm
  modified_base 32: mod_base = OTHER; note = locked nucleic acid
  modified_base 33: mod_base = OTHER; note = 2'O-methyl-adenosine
  misc_feature 1^2: note = phosphorothioate linkage
  misc_feature 2^3: note = phosphorothioate linkage
  misc_feature 3^4: note = phosphorothioate linkage
  misc_feature 4^5: note = phosphorothioate linkage
  misc_feature 29^30: note = phosphorothioate linkage
  misc_feature 30^31: note = phosphorothioate linkage
  misc_feature 31^32: note = phosphorothioate linkage
  misc_feature 32^33: note = phosphorothioate linkage
  misc_feature 1..19: note = At this position backbone is RNA
  misc_feature 21..33: note = At this position backbone is RNA

SEQ ID NO: 286 - DNA, 33 bp, synthetic construct; identical to SEQ ID NO: 218
  misc_feature 1..33: note = Description of sequence: bifunctional oligonucleotide
  source 1..33: mol_type = other DNA
  modified_base 1: mod_base = OTHER; note = 2', 5'-O-methoxy ethyl guanosine
  modified_base 2: mod_base = OTHER; note = locked nucleic acid
  modified_base 3: mod_base = OTHER; note = 2'-O-methoxy-ethyl cytidine
  modified_base 4: mod_base = OTHER; note = locked nucleic acid
  modified_base 5: mod_base = OTHER; note = 2'-O-methoxy-ethyl guanosine
  modified_base 6: mod_base = OTHER; note = locked nucleic acid
  modified_base 7: mod_base = OTHER; note = 2'-o-methoxy-ethyl thymidine
  modified_base 8: mod_base = OTHER; note = locked nucleic acid
  modified_base 9: mod_base = OTHER; note = 2'-O-methoxy-ethyl adenosine
  modified_base 10: mod_base = OTHER; note = locked nucleic acid
  modified_base 11: mod_base = OTHER; note = 2'-o-methoxy-ethyl thymidine
  modified_base 12: mod_base = OTHER; note = 2'-O-methoxy-ethyl adenosine
  modified_base 13: mod_base = OTHER; note = 2'-o-methoxy-ethyl thymidine
  modified_base 14: mod_base = OTHER; note = 2'-O-methoxy-ethyl adenosine
  modified_base 15: mod_base = OTHER; note = 2'-O-methoxy-ethyl adenosine
  modified_base 16: mod_base = OTHER; note = locked nucleic acid
  modified_base 17: mod_base = OTHER; note = 2'-O-methoxy-ethyl guanosine
  modified_base 18: mod_base = OTHER; note = 2'-O-methoxy-ethyl adenosine
  modified_base 19: mod_base = OTHER; note = 2'-O-methoxy-ethyl cytidine
  modified_base 20: mod_base = OTHER; note = locked nucleic acid
  modified_base 21: mod_base = OTHER; note = 2'-o-methoxy-ethyl thymidine
  modified_base 22: mod_base = OTHER; note = 2'-O-methoxy-ethyl guanosine
  modified_base 23: mod_base = OTHER; note = 2'-O-methoxy-ethyl adenosine
  modified_base 24: mod_base = OTHER; note = locked nucleic acid
  modified_base 25: mod_base = OTHER; note = 2'-O-methoxy-ethyl guanosine
  modified_base 26: mod_base = OTHER; note = 2'-O-methoxy-ethyl guanosine
  modified_base 27: mod_base = OTHER; note = 2'-O-methoxy-ethyl adenosine
  modified_base 28: mod_base = OTHER; note = locked nucleic acid
  modified_base 29: mod_base = OTHER; note = 2'-o-methoxy-ethyl thymidine
  modified_base 30: mod_base = OTHER; note = 2'-O-methoxy-ethyl cytidine
  modified_base 31: mod_base = OTHER; note = 2'-O-methoxy-ethyl guanosine
  modified_base 32: mod_base = OTHER; note = locked nucleic acid
  modified_base 33: mod_base = OTHER; note = 2', 3'-O-methoxy ethyl adenosine
  misc_feature 1^2: note = phosphorothioate linkage
  misc_feature 2^3: note = phosphorothioate linkage
  misc_feature 3^4: note = phosphorothioate linkage
  misc_feature 4^5: note = phosphorothioate linkage
  misc_feature 29^30: note = phosphorothioate linkage
  misc_feature 30^31: note = phosphorothioate linkage
  misc_feature 31^32: note = phosphorothioate linkage
  misc_feature 32^33: note = phosphorothioate linkage
  misc_feature 1..19: note = At this position backbone is RNA
  misc_feature 21..33: note = At this position backbone is RNA

SEQ ID NO: 287 - DNA, 33 bp, synthetic construct; identical to SEQ ID NO: 195
  misc_feature 1..33: note = Description of sequence: bifunctional oligonucleotide
  source 1..33: mol_type = other DNA
  modified_base 1: mod_base = gm
  modified_base 2: mod_base = cm
  modified_base 3: mod_base = cm
  modified_base 4: mod_base = OTHER; note = 2'O-methyl-adenosine
  modified_base 5: mod_base = gm
  modified_base 6: mod_base = gm
  modified_base 7: mod_base = um
  modified_base 8: mod_base = OTHER; note = 2'O-methyl-adenosine
  modified_base 9: mod_base = OTHER; note = 2'O-methyl-adenosine
  modified_base 10: mod_base = gm
  modified_base 11: mod_base = um
  modified_base 12: mod_base = OTHER; note = 2'O-methyl-adenosine
  modified_base 13: mod_base = um
  modified_base 14: mod_base = um
  modified_base 15: mod_base = um
  modified_base 16: mod_base = OTHER; note = locked nucleic acid
  modified_base 17: mod_base = OTHER; note = 2'O-methyl-adenosine
  modified_base 18: mod_base = um
  modified_base 19: mod_base = cm
  modified_base 20: mod_base = OTHER; note = locked nucleic acid
  modified_base 21: mod_base = gm
  modified_base 22: mod_base = cm
  modified_base 23: mod_base = um
  modified_base 24: mod_base = OTHER; note = locked nucleic acid
  modified_base 25: mod_base = um
  modified_base 26: mod_base = um
  modified_base 27: mod_base = cm
  modified_base 28: mod_base = OTHER; note = locked nucleic acid
  modified_base 29: mod_base = OTHER; note = 2'O-methyl-adenosine
  modified_base 30: mod_base = gm
  modified_base 31: mod_base = gm
  modified_base 32: mod_base = OTHER; note = locked nucleic acid
  modified_base 33: mod_base = um
  misc_feature 1^2: note = phosphorothioate linkage
  misc_feature 2^3: note = phosphorothioate linkage
  misc_feature 3^4: note = phosphorothioate linkage
  misc_feature 4^5: note = phosphorothioate linkage
  misc_feature 1..23: note = At this position backbone is RNA
  misc_feature 25..33: note = At this position backbone is RNA

SEQ ID NO: 288 - DNA, 33 bp, synthetic construct; identical to SEQ ID NO: 195
  misc_feature 1..33: note = Description of sequence: bifunctional oligonucleotide
  source 1..33: mol_type = other DNA
  modified_base 1: mod_base = gm
  modified_base 2: mod_base = cm
  modified_base 3: mod_base = cm
  modified_base 4: mod_base = OTHER; note = 2'O-methyl-adenosine
  modified_base 5: mod_base = gm
  modified_base 6: mod_base = gm
  modified_base 7: mod_base = um
  modified_base 8: mod_base = OTHER; note = 2'O-methyl-adenosine
  modified_base 9: mod_base = OTHER; note = 2'O-methyl-adenosine
  modified_base 10: mod_base = gm
  modified_base 11: mod_base = um
  modified_base 12: mod_base = OTHER; note = 2'O-methyl-adenosine
  modified_base 13: mod_base = um
  modified_base 14: mod_base = um
  modified_base 15: mod_base = um
  modified_base 16: mod_base = OTHER; note = locked nucleic acid
  modified_base 17: mod_base = OTHER; note = 2'O-methyl-adenosine
  modified_base 18: mod_base = um
  modified_base 19: mod_base = cm
  modified_base 20: mod_base = OTHER; note = locked nucleic acid
  modified_base 21: mod_base = gm
  modified_base 22: mod_base = cm
  modified_base 23: mod_base = um
  modified_base 24: mod_base = OTHER; note = locked nucleic acid
  modified_base 25: mod_base = um
  modified_base 26: mod_base = um
  modified_base 27: mod_base = cm
  modified_base 28: mod_base = OTHER; note = locked nucleic acid
  modified_base 29: mod_base = OTHER; note = 2'O-methyl-adenosine
  modified_base 30: mod_base = gm
  modified_base 31: mod_base = gm
  modified_base 32: mod_base = OTHER; note = locked nucleic acid
  modified_base 33: mod_base = um
  misc_feature 29^30: note = phosphorothioate linkage
  misc_feature 30^31: note = phosphorothioate linkage
  misc_feature 31^32: note = phosphorothioate linkage
  misc_feature 32^33: note = phosphorothioate linkage
  misc_feature 1..23: note = At this position backbone is RNA
  misc_feature 25..33: note = At this position backbone is RNA

SEQ ID NO: 289 - DNA, 33 bp, synthetic construct; identical to SEQ ID NO: 195
  misc_feature 1..33: note = Description of sequence: bifunctional oligonucleotide
  source 1..33: mol_type = other DNA
  modified_base 1: mod_base = gm
  modified_base 2: mod_base = cm
  modified_base 3: mod_base = cm
  modified_base 4: mod_base = OTHER; note = 2'O-methyl-adenosine
  modified_base 5: mod_base = gm
  modified_base 6: mod_base = gm
  modified_base 7: mod_base = um
  modified_base 8: mod_base = OTHER; note = 2'O-methyl-adenosine
  modified_base 9: mod_base = OTHER; note = 2'O-methyl-adenosine
  modified_base 10: mod_base = gm
  modified_base 11: mod_base = um
  modified_base 12: mod_base = OTHER; note = 2'O-methyl-adenosine
  modified_base 13: mod_base = um
  modified_base 14: mod_base = um
  modified_base 15: mod_base = um
  modified_base 16: mod_base = OTHER; note = locked nucleic acid
  modified_base 17: mod_base = OTHER; note = 2'O-methyl-adenosine
  modified_base 18: mod_base = um
  modified_base 19: mod_base = cm
  modified_base 20: mod_base = OTHER; note = locked nucleic acid
  modified_base 21: mod_base = gm
  modified_base 22: mod_base = cm
  modified_base 23: mod_base = um
  modified_base 24: mod_base = OTHER; note = locked nucleic acid
  modified_base 25: mod_base = um
  modified_base 26: mod_base = um
  modified_base 27: mod_base = cm
  modified_base 28: mod_base = OTHER; note = locked nucleic acid
  modified_base 29: mod_base = OTHER; note = 2'O-methyl-adenosine
  modified_base 30: mod_base = gm
  modified_base 31: mod_base = gm
  modified_base 32: mod_base = OTHER; note = locked nucleic acid
  modified_base 33: mod_base = um
  misc_feature 1^2: note = phosphorothioate linkage
  misc_feature 2^3: note = phosphorothioate linkage
  misc_feature 3^4: note = phosphorothioate linkage
  misc_feature 4^5: note = phosphorothioate linkage
  misc_feature 29^30: note = phosphorothioate linkage
  misc_feature 30^31: note = phosphorothioate linkage
  misc_feature 31^32: note = phosphorothioate linkage
  misc_feature 32^33: note = phosphorothioate linkage
  misc_feature 1..23: note = At this position backbone is RNA
  misc_feature 25..33: note = At this position backbone is RNA

SEQ ID NO: 290 - DNA, 33 bp, synthetic construct; identical to SEQ ID NO: 195
  misc_feature 1..33: note = Description of sequence: bifunctional oligonucleotide
  source 1..33: mol_type = other DNA
  modified_base 1: mod_base = gm
  modified_base 2: mod_base = cm
  modified_base 3: mod_base = cm
  modified_base 4: mod_base = OTHER; note = 2'O-methyl-adenosine
  modified_base 5: mod_base = gm
  modified_base 6: mod_base = gm
  modified_base 7: mod_base = um
  modified_base 8: mod_base = OTHER; note = 2'O-methyl-adenosine
  modified_base 9: mod_base = OTHER; note = 2'O-methyl-adenosine
  modified_base 10: mod_base = gm
  modified_base 11: mod_base = um
  modified_base 12: mod_base = OTHER; note = 2'O-methyl-adenosine
  modified_base 13: mod_base = um
  modified_base 14: mod_base = OTHER; note = 2'-o-methoxy-ethyl thymidine
  modified_base 15: mod_base = OTHER; note = 2'-o-methoxy-ethyl thymidine
  modified_base 16: mod_base = OTHER; note = locked nucleic acid
  modified_base 17: mod_base = OTHER; note = 2'-O-methoxy-ethyl adenosine
  modified_base 18: mod_base = OTHER; note = 2'-o-methoxy-ethyl thymidine
  modified_base 19: mod_base = OTHER; note = 2'-O-methoxy-ethyl cytidine
  modified_base 20: mod_base = OTHER; note = locked nucleic acid
  modified_base 21: mod_base = OTHER; note = 2'-O-methoxy-ethyl guanosine
  modified_base 22: mod_base = OTHER; note = 2'-O-methoxy-ethyl cytidine
  modified_base 23: mod_base = OTHER; note = 2'-o-methoxy-ethyl thymidine
  modified_base 24: mod_base = OTHER; note = locked nucleic acid
  modified_base 25: mod_base = OTHER; note = 2'-o-methoxy-ethyl thymidine
  modified_base 26: mod_base = OTHER; note = 2'-o-methoxy-ethyl thymidine
  modified_base 27: mod_base = OTHER; note = 2'-O-methoxy-ethyl cytidine
  modified_base 28: mod_base = OTHER; note = locked nucleic acid
  modified_base 29: mod_base = OTHER; note = 2'-O-methoxy-ethyl adenosine
  modified_base 30: mod_base = OTHER; note = 2'-O-methoxy-ethyl guanosine
  modified_base 31: mod_base = OTHER; note = 2'-O-methoxy-ethyl guanosine
  modified_base 32: mod_base = OTHER; note = locked nucleic acid
  modified_base 33: mod_base = OTHER; note = 2', 3'-O-methoxy ethyl thymidine
  misc_feature 29^30: note = phosphorothioate linkage
  misc_feature 30^31: note = phosphorothioate linkage
  misc_feature 31^32: note = phosphorothioate linkage
  misc_feature 32^33: note = phosphorothioate linkage
  misc_feature 1..23: note = At this position backbone is RNA
  misc_feature 25..33: note = At this position backbone is RNA

SEQ ID NO: 291 - DNA, 33 bp, synthetic construct; identical to SEQ ID NO: 195
  misc_feature 1..33: note = Description of sequence: bifunctional oligonucleotide
  source 1..33: mol_type = other DNA
  modified_base 1: mod_base = gm
  modified_base 2: mod_base = cm
  modified_base 3: mod_base = cm
  modified_base 4: mod_base = OTHER; note = 2'O-methyl-adenosine
  modified_base 5: mod_base = gm
  modified_base 6: mod_base = gm
  modified_base 7: mod_base = um
  modified_base 8: mod_base = OTHER; note = 2'O-methyl-adenosine
  modified_base 9: mod_base = OTHER; note = 2'O-methyl-adenosine
  modified_base 10: mod_base = gm
  modified_base 11: mod_base = um
  modified_base 12: mod_base = OTHER; note = 2'O-methyl-adenosine
  modified_base 13: mod_base = um
  modified_base 14: mod_base = OTHER; note = 2'-o-methoxy-ethyl thymidine
  modified_base 15: mod_base = OTHER; note = 2'-o-methoxy-ethyl thymidine
  modified_base 16: mod_base = OTHER; note = locked nucleic acid
  modified_base 17: mod_base = OTHER; note = 2'-O-methoxy-ethyl adenosine
  modified_base 18: mod_base = OTHER; note = 2'-o-methoxy-ethyl thymidine
  modified_base 19: mod_base = OTHER; note = 2'-O-methoxy-ethyl cytidine
  modified_base 20: mod_base = OTHER; note = locked nucleic acid
  modified_base 21: mod_base = OTHER; note = 2'-O-methoxy-ethyl guanosine
  modified_base 22: mod_base = OTHER; note = 2'-O-methoxy-ethyl cytidine
  modified_base 23: mod_base = OTHER; note = 2'-o-methoxy-ethyl thymidine
  modified_base 24: mod_base = OTHER; note = locked nucleic acid
  modified_base 25: mod_base = OTHER; note = 2'-o-methoxy-ethyl thymidine
  modified_base 26: mod_base = OTHER; note = 2'-o-methoxy-ethyl thymidine
  modified_base 27: mod_base = OTHER; note = 2'-O-methoxy-ethyl cytidine
  modified_base 28: mod_base = OTHER; note = locked nucleic acid
  modified_base 29: mod_base = OTHER; note = 2'-O-methoxy-ethyl adenosine
  modified_base 30: mod_base = OTHER; note = 2'-O-methoxy-ethyl guanosine
  modified_base 31: mod_base = OTHER; note = 2'-O-methoxy-ethyl guanosine
  modified_base 32: mod_base = OTHER; note = locked nucleic acid
  modified_base 33: mod_base = OTHER; note = 2', 3'-O-methoxy ethyl thymidine
  misc_feature 1^2: note = phosphorothioate linkage
  misc_feature 2^3: note = phosphorothioate linkage
  misc_feature 3^4: note = phosphorothioate linkage
  misc_feature 4^5: note = phosphorothioate linkage
  misc_feature 29^30: note = phosphorothioate linkage
  misc_feature 30^31: note = phosphorothioate linkage
  misc_feature 31^32: note = phosphorothioate linkage
  misc_feature 32^33: note = phosphorothioate linkage
  misc_feature 1..23: note = At this position backbone is RNA
  misc_feature 25..33: note = At this position backbone is RNA

SEQ ID NO: 292 - DNA, 33 bp, synthetic construct; identical to SEQ ID NO: 195
  misc_feature 1..33: note = Description of sequence: bifunctional oligonucleotide
  source 1..33: mol_type = other DNA
  modified_base 1: mod_base = OTHER; note = 2', 5'-O-methoxy ethyl guanosine
  modified_base 2: mod_base = OTHER; note = locked nucleic acid
  modified_base 3: mod_base = OTHER; note = 2'-O-methoxy-ethyl cytidine
  modified_base 4: mod_base = OTHER; note = locked nucleic acid
  modified_base 5: mod_base = OTHER; note = 2'-O-methoxy-ethyl guanosine
  modified_base 6: mod_base = OTHER; note = locked nucleic acid
  modified_base 7: mod_base = OTHER; note = 2'-o-methoxy-ethyl thymidine
  modified_base 8: mod_base = OTHER; note = locked nucleic acid
  modified_base 9: mod_base = OTHER; note = 2'-O-methoxy-ethyl adenosine
  modified_base 10: mod_base = OTHER; note = locked nucleic acid
  modified_base 11: mod_base = OTHER; note = 2'-o-methoxy-ethyl thymidine
  modified_base 12: mod_base = OTHER; note = 2'-O-methoxy-ethyl adenosine
  modified_base 13: mod_base = OTHER; note = 2'-o-methoxy-ethyl thymidine
  modified_base 14: mod_base = um
  modified_base 15: mod_base = um
  modified_base 16: mod_base = OTHER; note = locked nucleic acid
  modified_base 17: mod_base = OTHER; note = 2'O-methyl-adenosine
  modified_base 18: mod_base = um
  modified_base 19: mod_base = cm
  modified_base 20: mod_base = OTHER; note = locked nucleic acid
  modified_base 21: mod_base = gm
  modified_base 22: mod_base = cm
  modified_base 23: mod_base = um
  modified_base 24: mod_base = OTHER; note = locked nucleic acid
  modified_base 25: mod_base = um
  modified_base 26: mod_base = um
  modified_base 27: mod_base = cm
  modified_base 28: mod_base = OTHER; note = locked nucleic acid
  modified_base 29: mod_base = OTHER; note = 2'O-methyl-adenosine
  modified_base 30: mod_base = gm
  modified_base 31: mod_base = gm
  modified_base 32: mod_base = OTHER; note = locked nucleic acid
  modified_base 33: mod_base = um
  misc_feature 1^2: note = phosphorothioate linkage
  misc_feature 2^3: note = phosphorothioate linkage
  misc_feature 3^4: note = phosphorothioate linkage
  misc_feature 4^5: note = phosphorothioate linkage
  misc_feature 1..23: note = At this position backbone is RNA
  misc_feature 25..33: note = At this position backbone is RNA

SEQ ID NO: 293 - DNA, 33 bp, synthetic construct; identical to SEQ ID NO: 195
  misc_feature 1..33: note = Description of sequence: bifunctional oligonucleotide
  source 1..33: mol_type = other DNA
  modified_base 1: mod_base = OTHER; note = 2', 5'-O-methoxy ethyl guanosine
  modified_base 2: mod_base = OTHER; note = locked nucleic acid
  modified_base 3: mod_base = OTHER; note = 2'-O-methoxy-ethyl cytidine
  modified_base 4: mod_base = OTHER; note = locked nucleic acid
  modified_base 5: mod_base = OTHER; note = 2'-O-methoxy-ethyl guanosine
  modified_base 6: mod_base = OTHER; note = locked nucleic acid
  modified_base 7: mod_base = OTHER; note = 2'-o-methoxy-ethyl thymidine
  modified_base 8: mod_base = OTHER; note = locked nucleic acid
  modified_base 9: mod_base = OTHER; note = 2'-O-methoxy-ethyl adenosine
  modified_base 10: mod_base = OTHER; note = locked nucleic acid
  modified_base 11: mod_base = OTHER; note = 2'-o-methoxy-ethyl thymidine
  modified_base 12: mod_base = OTHER; note = 2'-O-methoxy-ethyl adenosine
  modified_base 13: mod_base = OTHER; note = 2'-o-methoxy-ethyl thymidine
  modified_base 14: mod_base = um
  modified_base 15: mod_base = um
  modified_base 16: mod_base = OTHER; note = locked nucleic acid
  modified_base 17: mod_base = OTHER; note = 2'O-methyl-adenosine
  modified_base 18: mod_base = um
  modified_base 19: mod_base = cm
  modified_base 20: mod_base = OTHER; note = locked nucleic acid
  modified_base 21: mod_base = gm
  modified_base 22: mod_base = cm
  modified_base 23: mod_base = um
  modified_base 24: mod_base = OTHER; note = locked nucleic acid
  modified_base 25: mod_base = um
  modified_base 26: mod_base = um
  modified_base 27: mod_base = cm
  modified_base 28: mod_base = OTHER; note = locked nucleic acid
  modified_base 29: mod_base = OTHER; note = 2'O-methyl-adenosine
  modified_base 30: mod_base = gm
  modified_base 31: mod_base = gm
  modified_base 32: mod_base = OTHER; note = locked nucleic acid
  modified_base 33: mod_base = um
  misc_feature 1^2: note = phosphorothioate linkage
  misc_feature 2^3: note = phosphorothioate linkage
  misc_feature 3^4: note = phosphorothioate linkage
  misc_feature 4^5: note = phosphorothioate linkage
  misc_feature 29^30: note = phosphorothioate linkage
  misc_feature 30^31: note = phosphorothioate linkage
  misc_feature 31^32: note = phosphorothioate linkage
  misc_feature 32^33: note = phosphorothioate linkage
  misc_feature 1..23: note = At this position backbone is RNA
  misc_feature 25..33: note = At this position backbone is RNA

SEQ ID NO: 294 - DNA, 33 bp, synthetic construct; identical to SEQ ID NO: 195
  misc_feature 1..33: note = Description of sequence: bifunctional oligonucleotide
  source 1..33: mol_type = other DNA
  modified_base 1: mod_base = OTHER; note = 2', 5'-O-methoxy ethyl guanosine
  modified_base 2: mod_base = OTHER; note = locked nucleic acid
  modified_base 3: mod_base = OTHER; note = 2'-O-methoxy-ethyl cytidine
  modified_base 4: mod_base = OTHER; note = locked nucleic acid
  modified_base 5: mod_base = OTHER; note = 2'-O-methoxy-ethyl guanosine
  modified_base 6: mod_base = OTHER; note = locked nucleic acid
  modified_base 7: mod_base = OTHER; note = 2'-o-methoxy-ethyl thymidine
  modified_base 8: mod_base = OTHER; note = locked nucleic acid
  modified_base 9: mod_base = OTHER; note = 2'-O-methoxy-ethyl adenosine
  modified_base 10: mod_base = OTHER; note = locked nucleic acid
  modified_base 11: mod_base = OTHER; note = 2'-o-methoxy-ethyl thymidine
  modified_base 12: mod_base = OTHER; note = 2'-O-methoxy-ethyl adenosine
  modified_base 13: mod_base = OTHER; note = 2'-o-methoxy-ethyl thymidine
  modified_base 14: mod_base = OTHER; note = 2'-o-methoxy-ethyl thymidine
  modified_base 15: mod_base = OTHER; note = 2'-o-methoxy-ethyl thymidine
  modified_base 16: mod_base = OTHER; note = locked nucleic acid
  modified_base 17: mod_base = OTHER; note = 2'-O-methoxy-ethyl adenosine
  modified_base 18: mod_base = OTHER; note = 2'-o-methoxy-ethyl thymidine
  modified_base 19: mod_base = OTHER; note = 2'-O-methoxy-ethyl cytidine
  modified_base 20: mod_base = OTHER; note = locked nucleic acid
  modified_base 21: mod_base = OTHER; note = 2'-O-methoxy-ethyl guanosine
  modified_base 22: mod_base = OTHER; note = 2'-O-methoxy-ethyl cytidine
  modified_base 23: mod_base = OTHER; note = 2'-o-methoxy-ethyl thymidine
  modified_base 24: mod_base = OTHER; note = locked nucleic acid
  modified_base 25: mod_base = OTHER; note = 2'-o-methoxy-ethyl thymidine
  modified_base 26: mod_base = OTHER; note = 2'-o-methoxy-ethyl thymidine
  modified_base 27: mod_base = OTHER; note = 2'-O-methoxy-ethyl cytidine
  modified_base 28: mod_base = OTHER; note = locked nucleic acid
  modified_base 29: mod_base = OTHER; note = 2'-O-methoxy-ethyl adenosine
  modified_base 30: mod_base = OTHER; note = 2'-O-methoxy-ethyl guanosine
  modified_base 31: mod_base = OTHER; note = 2'-O-methoxy-ethyl guanosine
  modified_base 32: mod_base = OTHER; note = locked nucleic acid
  modified_base 33: mod_base = OTHER; note = 2', 3'-O-methoxy ethyl thymidine
  misc_feature 1^2: note = phosphorothioate linkage
  misc_feature 2^3: note = phosphorothioate linkage
  misc_feature 3^4: note = phosphorothioate linkage
  misc_feature 4^5: note = phosphorothioate linkage
  misc_feature 29^30: note = phosphorothioate linkage
  misc_feature 30^31: note = phosphorothioate linkage
  misc_feature 31^32: note = phosphorothioate linkage
  misc_feature 32^33: note = phosphorothioate linkage
  misc_feature 1..23: note = At this position backbone is RNA
  misc_feature 25..33: note = At this position backbone is RNA

SEQ ID NO: 295 - RNA, 33 nt, synthetic construct; identical to SEQ ID NO: 100
  misc_feature 1..33: note = Description of sequence: Reference sequence for bifunctional oligonucleotide of SEQ ID NO: 100
  source 1..33: mol_type = other RNA

SEQ ID NO: 296 - DNA, 33 bp, synthetic construct; identical to SEQ ID NO: 101
  misc_feature 1..33: note = Description of sequence: Reference sequence for bifunctional oligonucleotide of SEQ ID NO: 101
  source 1..33: mol_type = other DNA
  misc_feature 1..15: note = At this position backbone is RNA
  misc_feature 17..33: note = At this position backbone is RNA

SEQ ID NO: 297 - DNA, 33 bp, synthetic construct; identical to SEQ ID NO: 102
  misc_feature 1..33: note = Description of sequence: Reference sequence for bifunctional oligonucleotide of SEQ ID NO: 102
  source 1..33: mol_type = other DNA
  misc_feature 1..19: note = At this position backbone is RNA
  misc_feature 21..27: note = At this position backbone is RNA
  misc_feature 29..33: note = At this position backbone is RNA

SEQ ID NO: 298 - DNA, 33 bp, synthetic construct; identical to SEQ ID NO: 103
  misc_feature 1..33: note = Description of sequence: Reference sequence for bifunctional oligonucleotide of SEQ ID NO: 103
  source 1..33: mol_type = other DNA
  misc_feature 1..19: note = At this position backbone is RNA
  misc_feature 21..33: note = At this position backbone is RNA

SEQ ID NO: 299 - RNA, 33 nt, synthetic construct; identical to SEQ ID NO: 104
  misc_feature 1..33: note = Description of sequence: Reference sequence for bifunctional oligonucleotide of SEQ ID NO: 104
  source 1..33: mol_type = other RNA

SEQ ID NO: 300 - DNA, 33 bp, synthetic construct; identical to SEQ ID NO: 105
  misc_feature 1..33: note = Description of sequence: Reference sequence for bifunctional oligonucleotide of SEQ ID NO: 105
  source 1..33: mol_type = other DNA
  misc_feature 1..15: note = At this position backbone is RNA
  misc_feature 17..19: note = At this position backbone is RNA
  misc_feature 21..33: note = At this position backbone is RNA

SEQ ID NO: 301 - DNA, 33 bp, synthetic construct; identical to SEQ ID NO: 106
  misc_feature 1..33: note = Description of sequence: Reference sequence for bifunctional oligonucleotide of SEQ ID NO: 106
  source 1..33: mol_type = other DNA
  misc_feature 1..23: note = At this position backbone is RNA
  misc_feature 25..31: note = At this position backbone is RNA
  misc_feature 33: note = At this position backbone is RNA

SEQ ID NO: 302 - DNA, 33 bp, synthetic construct; identical to SEQ ID NO: 107
  misc_feature 1..33: note = Description of sequence: Reference sequence for bifunctional oligonucleotide of SEQ ID NO: 107
  source 1..33: mol_type = other DNA
  misc_feature 1..23: note = At this position backbone is RNA
  misc_feature 25..33: note = At this position backbone is RNA

SEQ ID NO: 303 - RNA, 33 nt, synthetic construct; identical to SEQ ID NO: 108
  misc_feature 1..33: note = Description of sequence: Reference sequence for bifunctional oligonucleotide of SEQ ID NO: 108
  source 1..33: mol_type = other RNA

SEQ ID NO: 304 - DNA, 33 bp, synthetic construct; identical to SEQ ID NO: 109
  misc_feature 1..33: note = Description of sequence: Reference sequence for bifunctional oligonucleotide of SEQ ID NO: 109
  source 1..33: mol_type = other DNA
  misc_feature 1..19: note = At this position backbone is RNA
  misc_feature 21..23: note = At this position backbone is RNA
  misc_feature 25..33: note = At this position backbone is RNA

SEQ ID NO: 305 - DNA, 33 bp, synthetic construct; identical to SEQ ID NO: 110
  misc_feature 1..33: note = Description of sequence: Reference sequence for bifunctional oligonucleotide of SEQ ID NO: 110
  source 1..33: mol_type = other DNA
  misc_feature 1..27: note = At this position backbone is RNA
  misc_feature 29..33: note = At this position backbone is RNA

SEQ ID NO: 306 - DNA, 33 bp, synthetic construct; identical to SEQ ID NO: 111
  misc_feature 1..33: note = Description of sequence: Reference sequence for bifunctional oligonucleotide of SEQ ID NO: 111
  source 1..33: mol_type = other DNA
  misc_feature 1..27: note = At this position backbone is RNA
  misc_feature 29..33: note = At this position backbone is RNA

SEQ ID NO: 307 - RNA, 33 nt, synthetic construct; identical to SEQ ID NO: 112
  misc_feature 1..33: note = Description of sequence: Reference sequence for bifunctional oligonucleotide of SEQ ID NO: 112
  source 1..33: mol_type = other RNA

SEQ ID NO: 308 - DNA, 33 bp, synthetic construct; identical to SEQ ID NO: 113
  misc_feature 1..33: note = Description of sequence: Reference sequence for bifunctional oligonucleotide of SEQ ID NO: 113
  source 1..33: mol_type = other DNA
  misc_feature 1..23: note = At this position backbone is RNA
  misc_feature 25..27: note = At this position backbone is RNA
  misc_feature 29..33: note = At this position backbone is RNA

SEQ ID NO: 309 - DNA, 33 bp, synthetic construct; identical to SEQ ID NO: 114
  misc_feature 1..33: note = Description of sequence: Reference sequence for bifunctional oligonucleotide of SEQ ID NO: 114
  source 1..33: mol_type = other DNA
  misc_feature 1..31: note = At this position backbone is RNA
  misc_feature 33: note = At this position backbone is RNA

SEQ ID NO: 310 - DNA, 33 bp, synthetic construct; identical to SEQ ID NO: 115
  misc_feature 1..33: note = Description of sequence: Reference sequence for bifunctional oligonucleotide of SEQ ID NO: 115
  source 1..33: mol_type = other DNA
  misc_feature 1..15: note = At this position backbone is RNA
  misc_feature 17..31: note = At this position backbone is RNA
  misc_feature 33: note = At this position backbone is RNA

SEQ ID NO: 311 - RNA, 33 nt, synthetic construct; identical to SEQ ID NO: 116
  misc_feature 1..33: note = Description of sequence: Reference sequence for bifunctional oligonucleotide of SEQ ID NO: 116
  source 1..33: mol_type = other RNA

SEQ ID NO: 312 - DNA, 33 bp, synthetic construct; identical to SEQ ID NO: 117
  misc_feature 1..33: note = Description of sequence: Reference sequence for bifunctional oligonucleotide of SEQ ID NO: 117
  source 1..33: mol_type = other DNA
  misc_feature 1..27: note = At this position backbone is RNA
  misc_feature 29..31: note = At this position backbone is RNA
  misc_feature 33: note = At this position backbone is RNA

SEQ ID NO: 313 - RNA, 33 nt, synthetic construct; identical to SEQ ID NO: 118
  misc_feature 1..33: note = Description of sequence: Reference sequence for bifunctional oligonucleotide of SEQ ID NO: 118
  source 1..33: mol_type = other RNA

SEQ ID NO: 314 - DNA, 33 bp, synthetic construct; identical to SEQ ID NO: 119
  misc_feature 1..33: note = Description of sequence: Reference sequence for bifunctional oligonucleotide of SEQ ID NO: 119
  source 1..33: mol_type = other DNA
  misc_feature 1..19: note = At this position backbone is RNA
  misc_feature 21..33: note = At this position backbone is RNA

SEQ ID NO: 315 - RNA, 33 nt, synthetic construct; identical to SEQ ID NO: 120
  misc_feature 1..33: note = Description of sequence: Reference sequence for bifunctional oligonucleotide of SEQ ID NO: 120
  source 1..33: mol_type = other RNA

SEQ ID NO: 316 - DNA, 33 bp, synthetic construct; identical to SEQ ID NO: 121
  misc_feature 1..33: note = Description of sequence: Reference sequence for bifunctional oligonucleotide of SEQ ID NO: 121
  source 1..33: mol_type = other DNA
  misc_feature 1..31: note = At this position backbone is RNA
  misc_feature 33: note = At this position backbone is RNA

SEQ ID NO: 317 - RNA, 33 nt, synthetic construct; identical to SEQ ID NO: 122
  misc_feature 1..33: note = Description of sequence: Reference sequence for bifunctional oligonucleotide of SEQ ID NO: 122
  source 1..33: mol_type = other RNA

SEQ ID NO: 318 - DNA, 33 bp, synthetic construct; identical to SEQ ID NO: 123
  misc_feature 1..33: note = Description of sequence: Reference sequence for bifunctional oligonucleotide of SEQ ID NO: 123
  source 1..33: mol_type = other DNA
  misc_feature 1..23: note = At this position backbone is RNA
  misc_feature 25..33: note = At this position backbone is RNA

SEQ ID NO: 319 - RNA, 33 nt, synthetic construct; identical to SEQ ID NO: 124
  misc_feature 1..33: note = Description of sequence: Reference sequence for bifunctional oligonucleotide of SEQ ID NO: 124
  source 1..33: mol_type = other RNA

SEQ ID NO: 320 - RNA, 33 nt, synthetic construct; identical to SEQ ID NO: 125
  misc_feature 1..33: note = Description of sequence: Reference sequence for bifunctional oligonucleotide of SEQ ID NO: 125
  source 1..33: mol_type = other RNA

SEQ ID NO: 321 - RNA, 33 nt, synthetic construct; identical to SEQ ID NO: 126
  misc_feature 1..33: note = Description of sequence: Reference sequence for bifunctional oligonucleotide of SEQ ID NO: 126
  source 1..33: mol_type = other RNA

SEQ ID NO: 322 - DNA, 33 bp, synthetic construct; identical to SEQ ID NO: 127
  misc_feature 1..33: note = Description of sequence: Reference sequence for bifunctional oligonucleotide of SEQ ID NO: 127
  source 1..33: mol_type = other DNA
  misc_feature 1..27: note = At this position backbone is RNA
  misc_feature 29..33: note = At this position backbone is RNA

SEQ ID NO: 323 - DNA, 33 bp, synthetic construct; identical to SEQ ID NO: 128
  misc_feature 1..33: note = Description of sequence: Reference sequence for bifunctional oligonucleotide of SEQ ID NO: 128
  source 1..33: mol_type = other DNA
  misc_feature 1..15: note = At this position backbone is RNA
  misc_feature 17..33: note = At this position backbone is RNA

SEQ ID NO: 324 - RNA, 33 nt, synthetic construct; identical to SEQ ID NO: 129
  misc_feature 1..33: note = Description of sequence: Reference sequence for bifunctional oligonucleotide of SEQ ID NO: 129
  source 1..33: mol_type = other RNA

SEQ ID NO: 325 - RNA, 33 nt, synthetic construct; identical to SEQ ID NO: 130
  misc_feature 1..33: note = Description of sequence: Reference sequence for bifunctional oligonucleotide of SEQ ID NO: 130
  source 1..33: mol_type = other RNA

SEQ ID NO: 326 - DNA, 33 bp, synthetic construct; identical to SEQ ID NO: 131
  misc_feature 1..33: note = Description of sequence: Reference sequence for bifunctional oligonucleotide of SEQ ID NO: 131
  source 1..33: mol_type = other DNA
  misc_feature 1..31: note = At this position backbone is RNA
  misc_feature 33: note = At this position backbone is RNA

SEQ ID NO: 327 - DNA, 33 bp, synthetic construct; identical to SEQ ID NO: 132
  misc_feature 1..33: note = Description of sequence: Reference sequence for bifunctional oligonucleotide of SEQ ID NO: 132
  source 1..33: mol_type = other DNA
  misc_feature 1..19: note = At this position backbone is RNA
  misc_feature 21..33: note = At this position backbone is RNA

SEQ ID NO: 328 - RNA, 33 nt, synthetic construct; identical to SEQ ID NO: 133
  misc_feature 1..33: note = Description of sequence: Reference sequence for bifunctional oligonucleotide of SEQ ID NO: 133
  source 1..33: mol_type = other RNA

SEQ ID NO: 329 - RNA, 33 nt, synthetic construct; identical to SEQ ID NO: 134
  misc_feature 1..33: note = Description of sequence: Reference sequence for bifunctional oligonucleotide of SEQ ID NO: 134
  source 1..33: mol_type = other RNA

SEQ ID NO: 330 - RNA, 33 nt, synthetic construct; identical to SEQ ID NO: 135
  misc_feature 1..33: note = Description of sequence: Reference sequence for bifunctional oligonucleotide of SEQ ID NO: 135
  source 1..33: mol_type = other RNA

SEQ ID NO: 331 - DNA, 33 bp, synthetic construct; identical to SEQ ID NO: 136
  misc_feature 1..33: note = Description of sequence: Reference sequence for bifunctional oligonucleotide of SEQ ID NO: 136
  source 1..33: mol_type = other DNA
  misc_feature 1..23: note = At this position backbone is RNA
  misc_feature 25..33: note = At this position backbone is RNA

SEQ ID NO: 332 - RNA, 33 nt, synthetic construct; identical to SEQ ID NO: 137
  misc_feature 1..33: note = Description of sequence: Reference sequence for bifunctional oligonucleotide of SEQ ID NO: 137
  source 1..33: mol_type = other RNA

SEQ ID NO: 333 - RNA, 33 nt, synthetic construct; identical to SEQ ID NO: 138
  misc_feature 1..33: note = Description of sequence: Reference sequence for bifunctional oligonucleotide of SEQ ID NO: 138
  source 1..33: mol_type = other RNA

SEQ ID NO: 334 - DNA, 33 bp, synthetic construct; identical to SEQ ID NO: 139
  misc_feature 1..33: note = Description of sequence: Reference sequence for bifunctional oligonucleotide of SEQ ID NO: 139
  source 1..33: mol_type = other DNA
  misc_feature 1..15: note = At this position backbone is RNA
  misc_feature 17..33: note = At this position backbone is RNA

SEQ ID NO: 335 - DNA, 33 bp, synthetic construct; identical to SEQ ID NO: 140
  misc_feature 1..33: note = Description of sequence: Reference sequence for bifunctional oligonucleotide of SEQ ID NO: 140
  source 1..33: mol_type = other DNA
  misc_feature 1..27: note = At this position backbone is RNA
  misc_feature 29..33: note = At this position backbone is RNA

SEQ ID NO: 336 - DNA, 33 bp, synthetic construct; identical to SEQ ID NO: 141
  misc_feature 1..33: note = Description of sequence: Reference sequence for bifunctional oligonucleotide of SEQ ID NO: 141
  source 1..33: mol_type = other DNA
  misc_feature 1..15: note = At this position backbone is RNA
  misc_feature 17..33: note = At this position backbone is RNA

SEQ ID NO: 337 - RNA, 33 nt, synthetic construct; identical to SEQ ID NO: 142
  misc_feature 1..33: note = Description of sequence: Reference sequence for bifunctional oligonucleotide of SEQ ID NO: 142
  source 1..33: mol_type = other RNA

SEQ ID NO: 338 - DNA, 33 bp, synthetic construct; identical to SEQ ID NO: 143
  misc_feature 1..33: note = Description of sequence: Reference sequence for bifunctional oligonucleotide of SEQ ID NO: 143
  source 1..33: mol_type = other DNA
  misc_feature 1..19: note = At this position backbone is RNA
  misc_feature 21..33: note = At this position backbone is RNA

SEQ ID NO: 339 - RNA, 33 nt, synthetic construct; identical to SEQ ID NO: 144
  misc_feature 1..33: note = Description of sequence: Reference sequence for bifunctional oligonucleotide of SEQ ID NO: 144
  source 1..33: mol_type = other RNA

SEQ ID NO: 340 - RNA, 33 nt, synthetic construct; identical to SEQ ID NO: 145
  misc_feature 1..33: note = Description of sequence: Reference sequence for bifunctional oligonucleotide of SEQ ID NO: 145
  source 1..33: mol_type = other RNA

SEQ ID NO: 341 - DNA, 33 bp, synthetic construct; identical to SEQ ID NO: 146
  misc_feature 1..33: note = Description of sequence: Reference sequence for bifunctional oligonucleotide of SEQ ID NO: 146
  source 1..33: mol_type = other DNA
  misc_feature 1..15: note = At this position backbone is RNA
  misc_feature 17..27: note = At this position backbone is RNA
  misc_feature 29..33: note = At this position backbone is RNA

SEQ ID NO: 342 - RNA, 33 nt, synthetic construct; identical to SEQ ID NO: 147
  misc_feature 1..33: note = Description of sequence: Reference sequence for bifunctional oligonucleotide of SEQ ID NO: 147
  source 1..33: mol_type = other RNA

SEQ ID NO: 343 - RNA, 33 nt, synthetic construct; identical to SEQ ID NO: 148
  misc_feature 1..33: note = Description of sequence: Reference sequence for bifunctional oligonucleotide of SEQ ID NO: 148
  source 1..33: mol_type = other RNA

SEQ ID NO: 344 - RNA, 33 nt, synthetic construct; identical to SEQ ID NO: 149
  misc_feature 1..33: note = Description of sequence: Reference sequence for bifunctional oligonucleotide of SEQ ID NO: 149
  source 1..33: mol_type = other RNA

SEQ ID NO: 345 - RNA, 33 nt, synthetic construct; identical to SEQ ID NO: 150
  misc_feature 1..33: note = Description of sequence: Reference sequence for bifunctional oligonucleotide of SEQ ID NO: 150
  source 1..33: mol_type = other RNA

SEQ ID NO: 346 - DNA, 33 bp, synthetic construct; identical to SEQ ID NO: 151
  misc_feature 1..33: note = Description of sequence: Reference sequence for bifunctional oligonucleotide of SEQ ID NO: 151
  source 1..33: mol_type = other DNA
  misc_feature 1..19: note = At this position backbone is RNA
  misc_feature 21..33: note = At this position backbone is RNA

SEQ ID NO: 347 - RNA, 33 nt, synthetic construct; identical to SEQ ID NO: 152
  misc_feature 1..33: note = Description of sequence: Reference sequence for bifunctional oligonucleotide of SEQ ID NO: 152
  source 1..33: mol_type = other RNA

SEQ ID NO: 348 - DNA, 33 bp, synthetic construct; identical to SEQ ID NO: 153
  misc_feature 1..33: note = Description of sequence: Reference sequence for bifunctional oligonucleotide of SEQ ID NO: 153
  source 1..33: mol_type = other DNA
  misc_feature 1..31: note = At this position backbone is RNA
  misc_feature 33: note = At this position backbone is RNA

SEQ ID NO: 349 - RNA, 33 nt, synthetic construct; identical to SEQ ID NO: 154
  misc_feature 1..33: note = Description of sequence: Reference sequence for bifunctional oligonucleotide of SEQ ID NO: 154
  source 1..33: mol_type = other RNA

SEQ ID NO: 350 - DNA, 33 bp, synthetic construct; identical to SEQ ID NO: 155
  misc_feature 1..33: note = Description of sequence: Reference sequence for bifunctional oligonucleotide of SEQ ID NO: 155
  source 1..33: mol_type = other DNA
  misc_feature 1..15: note = At this position backbone is RNA
  misc_feature 17..27: note = At this position backbone is RNA
  misc_feature 29..33: note = At this position backbone is RNA

SEQ ID NO: 351 - RNA, 33 nt, synthetic construct; identical to SEQ ID NO: 156
  misc_feature 1..33: note = Description of sequence: Reference sequence for bifunctional oligonucleotide of SEQ ID NO: 156
  source 1..33: mol_type = other RNA

SEQ ID NO: 352 - RNA, 33 nt, synthetic construct; identical to SEQ ID NO: 157
  misc_feature 1..33: note = Description of sequence: Reference sequence for bifunctional oligonucleotide of SEQ ID NO: 157
  source 1..33: mol_type = other RNA

SEQ ID NO: 353 - RNA, 33 nt, synthetic construct; identical to SEQ ID NO: 158
  misc_feature 1..33: note = Description of sequence: Reference sequence for bifunctional oligonucleotide of SEQ ID NO: 158
  source 1..33: mol_type = other RNA

SEQ ID NO: 354 - DNA, 33 bp, synthetic construct; identical to SEQ ID NO: 159
  misc_feature 1..33: note = Description of sequence: Reference sequence for bifunctional oligonucleotide of SEQ ID NO: 159
  source 1..33: mol_type = other DNA
  misc_feature 1..19: note = At this position backbone is RNA
  misc_feature 21..31: note = At this position backbone is RNA
  misc_feature 33: note = At this position backbone is RNA

SEQ ID NO: 355 - RNA, 33 nt, synthetic construct; identical to SEQ ID NO: 160
  misc_feature 1..33: note = Description of sequence: Reference sequence for bifunctional oligonucleotide of SEQ ID NO: 160
  source 1..33: mol_type = other RNA

SEQ ID NO: 356 - RNA, 33 nt, synthetic construct; identical to SEQ ID NO: 161
  misc_feature 1..33: note = Description of sequence: Reference sequence for bifunctional oligonucleotide of SEQ ID NO: 161
  source 1..33: mol_type = other RNA

SEQ ID NO: 357 - RNA, 33 nt, synthetic construct; identical to SEQ ID NO: 162
  misc_feature 1..33: note = Description of sequence: Reference sequence for bifunctional oligonucleotide of SEQ ID NO: 162
  source 1..33: mol_type = other RNA

SEQ ID NO: 358 - DNA, 33 bp, synthetic construct; identical to SEQ ID NO: 163
  misc_feature 1..33: note = Description of sequence: Reference sequence for bifunctional oligonucleotide of SEQ ID NO: 163
  source 1..33: mol_type = other DNA
  misc_feature 1..23: note = At this position backbone is RNA
  misc_feature 25..33: note = At this position backbone is RNA

SEQ ID NO: 359 - RNA, 33 nt, synthetic construct; identical to SEQ ID NO: 164
  misc_feature 1..33: note = Description of sequence: Reference sequence for bifunctional oligonucleotide of SEQ ID NO: 164
  source 1..33: mol_type = other RNA

SEQ ID NO: 360 - RNA, 33 nt, synthetic construct; identical to SEQ ID NO: 165
  misc_feature 1..33: note = Description of sequence: Reference sequence for bifunctional oligonucleotide of SEQ ID NO: 165
  source 1..33: mol_type = other RNA

SEQ ID NO: 361 - DNA, 33 bp, synthetic construct; identical to SEQ ID NO: 166
  misc_feature 1..33: note = Description of sequence: Reference sequence for bifunctional oligonucleotide of SEQ ID NO: 166
  source 1..33: mol_type = other DNA
  misc_feature 1..31: note = At this position backbone is RNA
  misc_feature 33: note = At this position backbone is RNA

SEQ ID NO: 362 - RNA, 33 nt, synthetic construct; identical to SEQ ID NO: 167
  misc_feature 1..33: note = Description of sequence: Reference sequence for bifunctional oligonucleotide of SEQ ID NO: 167
  source 1..33: mol_type = other RNA

SEQ ID NO: 363 - DNA, 33 bp, synthetic construct; identical to SEQ ID NO: 168
  misc_feature 1..33: note = Description of sequence: Reference sequence for bifunctional oligonucleotide of SEQ ID NO: 168
  source 1..33: mol_type = other DNA
  misc_feature 1..15: note = At this position backbone is RNA
  misc_feature 17..33: note = At this position backbone is RNA

SEQ ID NO: 364 - RNA, 33 nt, synthetic construct; identical to SEQ ID NO: 169
  misc_feature 1..33: note = Description of sequence: Reference sequence for bifunctional oligonucleotide of SEQ ID NO: 169
  source 1..33: mol_type = other RNA

SEQ ID NO: 365 - DNA, 33 bp, synthetic construct; identical to SEQ ID NO: 170
  misc_feature 1..33: note = Description of sequence: Reference sequence for bifunctional oligonucleotide of SEQ ID NO: 170
  source 1..33: mol_type = other DNA
  misc_feature 1..19: note = At this position backbone is RNA
  misc_feature 21..33: note = At this position backbone is RNA

SEQ ID NO: 366 - RNA, 33 nt, synthetic construct; identical to SEQ ID NO: 171
  misc_feature 1..33: note = Description of sequence: Reference sequence for bifunctional oligonucleotide of SEQ ID NO: 171
  source 1..33: mol_type = other RNA

SEQ ID NO: 367 - DNA, 33 bp, synthetic construct; identical to SEQ ID NO: 172
  misc_feature 1..33: note = Description of sequence: Reference sequence for bifunctional oligonucleotide of SEQ ID NO: 172
  source 1..33: mol_type = other DNA
  misc_feature 1..15: note = At this position backbone is RNA
  misc_feature 17..23: note = At this position backbone is RNA
  misc_feature 25..33: note = At this position backbone is RNA

SEQ ID NO: 368 - RNA, 33 nt, synthetic construct; identical to SEQ ID NO: 173
  misc_feature 1..33: note = Description of sequence: Reference sequence for bifunctional oligonucleotide of SEQ ID NO: 173
  source 1..33: mol_type = other RNA

SEQ ID NO: 369 - DNA, 33 bp, synthetic construct; identical to SEQ ID NO: 174
  misc_feature 1..33: note = Description of sequence: Reference sequence for bifunctional oligonucleotide of SEQ ID NO: 174
  source 1..33: mol_type = other DNA
  misc_feature 1..23: note = At this position backbone is RNA
  misc_feature 25..33: note = At this position backbone is RNA

SEQ ID NO: 370 - RNA, 33 nt, synthetic construct; identical to SEQ ID NO: 175
  misc_feature 1..33: note = Description of sequence: Reference sequence for bifunctional oligonucleotide of SEQ ID NO: 175
  source 1..33: mol_type = other RNA

SEQ ID NO: 371 - DNA, 33 bp, synthetic construct; identical to SEQ ID NO: 176
  misc_feature 1..33: note = Description of sequence: Reference sequence for bifunctional oligonucleotide of SEQ ID NO: 176
  source 1..33: mol_type = other DNA
  misc_feature 1..19: note = At this position backbone is RNA
  misc_feature 21..27: note = At this position backbone is RNA
  misc_feature 29..33: note = At this position backbone is RNA

SEQ ID NO: 372 - RNA, 33 nt, synthetic construct; identical to SEQ ID NO: 177
  misc_feature 1..33: note = Description of sequence: Reference sequence for bifunctional oligonucleotide of SEQ ID NO: 177
  source 1..33: mol_type = other RNA

SEQ ID NO: 373 - DNA, 33 bp, synthetic construct; identical to SEQ ID NO: 178
  misc_feature 1..33: note = Description of sequence: Reference sequence for bifunctional oligonucleotide of SEQ ID NO: 178
  source 1..33: mol_type = other DNA
  misc_feature 1..15: note = At this position backbone is RNA
  misc_feature 17..27: note = At this position backbone is RNA
  misc_feature 29..33: note = At this position backbone is RNA

SEQ ID NO: 374 - RNA, 33 nt, synthetic construct; identical to SEQ ID NO: 179
  misc_feature 1..33: note = Description of sequence: Reference sequence for bifunctional oligonucleotide of SEQ ID NO: 179
  source 1..33: mol_type = other RNA

SEQ ID NO: 375 - DNA, 33 bp, synthetic construct; identical to SEQ ID NO: 180
  misc_feature 1..33: note = Description of sequence: Reference sequence for bifunctional oligonucleotide of SEQ ID NO: 180
  source 1..33: mol_type = other DNA
  misc_feature 1..23: note = At this position backbone is RNA
  misc_feature 25..31: note = At this position backbone is RNA
  misc_feature 33: note = At this position backbone is RNA

SEQ ID NO: 376 - RNA, 33 nt, synthetic construct; identical to SEQ ID NO: 181
  misc_feature 1..33: note = Description of sequence: Reference sequence for bifunctional oligonucleotide of SEQ ID NO: 181
  source 1..33: mol_type = other RNA

SEQ ID NO: 377 - DNA, 33 bp, synthetic construct; identical to SEQ ID NO: 182
  misc_feature 1..33: note = Description of sequence: Reference sequence for bifunctional oligonucleotide of SEQ ID NO: 182
  source 1..33: mol_type = other DNA
  misc_feature 1..19: note = At this position backbone is RNA
  misc_feature 21..31: note = At this position backbone is RNA
  misc_feature 33: note = At this position backbone is RNA

SEQ ID NO: 378 - RNA, 33 nt, synthetic construct; identical to SEQ ID NO: 183
  misc_feature 1..33: note = Description of sequence: Reference sequence for bifunctional oligonucleotide of SEQ ID NO: 183
  source 1..33: mol_type = other RNA

SEQ ID NO: 379 - DNA, 33 bp, synthetic construct; identical to SEQ ID NO: 184
  misc_feature 1..33: note = Description of sequence: Reference sequence for bifunctional oligonucleotide of SEQ ID NO: 184
  source 1..33: mol_type = other DNA
  misc_feature 1..27: note = At this position backbone is RNA
  misc_feature 29..33: note = At this position backbone is RNA

SEQ ID NO: 380 - DNA, 33 bp, synthetic construct; identical to SEQ ID NO: 185
  misc_feature 1..33: note = Description of sequence: Reference sequence for bifunctional oligonucleotide of SEQ ID NO: 185
  source 1..33: mol_type = other DNA
  misc_feature 1..15: note = At this position backbone is RNA
  misc_feature 17..33: note = At this position backbone is RNA

SEQ ID NO: 381 - DNA, 33 bp, synthetic construct; identical to SEQ ID NO: 186
  misc_feature 1..33: note = Description of sequence: Reference sequence for bifunctional oligonucleotide of SEQ ID NO: 186
  source 1..33: mol_type = other DNA
  misc_feature 1..15: note = At this position backbone is RNA
  misc_feature 17..23: note = At this position backbone is RNA
  misc_feature 25..33: note = At this position backbone is RNA

SEQ ID NO: 382 - DNA, 33 bp, synthetic construct; identical to SEQ ID NO: 187
  misc_feature 1..33: note = Description of sequence: Reference sequence for bifunctional oligonucleotide of SEQ ID NO: 187
  source 1..33: mol_type = other DNA
  misc_feature 1..15: note = At this position backbone is RNA
  misc_feature 17..33: note = At this position backbone is RNA

SEQ ID NO: 383 - DNA, 33 bp, synthetic construct; identical to SEQ ID NO: 188
  misc_feature 1..33: note = Description of sequence: Reference sequence for bifunctional oligonucleotide of SEQ ID NO: 188
  source 1..33: mol_type = other DNA
  misc_feature 1..15: note = At this position backbone is RNA
  misc_feature 17..31: note = At this position backbone is RNA
  misc_feature 33: note = At this position backbone is RNA

SEQ ID NO: 384 - DNA, 33 bp, synthetic construct; identical to SEQ ID NO: 189
  misc_feature 1..33: note = Description of sequence: Reference sequence for bifunctional oligonucleotide of SEQ ID NO: 189
  source 1..33: mol_type = other DNA
  misc_feature 1..19: note = At this position backbone is RNA
  misc_feature 21..33: note = At this position backbone is RNA

SEQ ID NO: 385 - DNA, 33 bp, synthetic construct; identical to SEQ ID NO: 190
  misc_feature 1..33: note = Description of sequence: Reference sequence for bifunctional oligonucleotide of SEQ ID NO: 190
  source 1..33: mol_type = other DNA
  misc_feature 1..19: note = At this position backbone is RNA
  misc_feature 21..27: note = At this position backbone is RNA
  misc_feature 29..33: note = At this position backbone is RNA

SEQ ID NO: 386 - DNA, 33 bp, synthetic construct; identical to SEQ ID NO: 191
  misc_feature 1..33: note = Description of sequence: Reference sequence for bifunctional oligonucleotide of SEQ ID NO: 191
  source 1..33: mol_type = other DNA
  misc_feature 1..19: note = At this position backbone is RNA
  misc_feature 21..33: note = At this position backbone is RNA

SEQ ID NO: 387 - DNA, 33 bp, synthetic construct; identical to SEQ ID NO: 192
  misc_feature 1..33: note = Description of sequence: Reference sequence for bifunctional oligonucleotide of SEQ ID NO: 192
  source 1..33: mol_type = other DNA
  misc_feature 1..19: note = At this position backbone is RNA
  misc_feature 21..33: note = At this position backbone is RNA

SEQ ID NO: 388 - DNA, 33 bp, synthetic construct; identical to SEQ ID NO: 193
  misc_feature 1..33: note = Description of sequence: Reference sequence for bifunctional oligonucleotide of SEQ ID NO: 193
  source 1..33: mol_type = other DNA
  misc_feature 1..15: note = At this position backbone is RNA
  misc_feature 17..23: note = At this position backbone is RNA
  misc_feature 25..33: note = At this position backbone is RNA

SEQ ID NO: 389 - DNA, 33 bp, synthetic construct; identical to SEQ ID NO: 194
  misc_feature 1..33: note = Description of sequence: Reference sequence for bifunctional oligonucleotide of SEQ ID NO: 194
  source 1..33: mol_type = other DNA
  misc_feature 1..23: note = At this position backbone is RNA
  misc_feature 25..31: note = At this position backbone is RNA
  misc_feature 33: note = At this position backbone is RNA

SEQ ID NO: 390 - DNA, 33 bp, synthetic construct; identical to SEQ ID NO: 195
  misc_feature 1..33: note = Description of sequence: Reference sequence for bifunctional oligonucleotide of SEQ ID NO: 195
  source 1..33: mol_type = other DNA
  misc_feature 1..23: note = At this position backbone is RNA
  misc_feature 25..33: note = At this position backbone is RNA

SEQ ID NO: 391 - DNA, 33 bp, synthetic construct; identical to SEQ ID NO: 196
  misc_feature 1..33: note = Description of sequence: Reference sequence for bifunctional oligonucleotide of SEQ ID NO: 196
  source 1..33: mol_type = other DNA
  misc_feature 1..15: note = At this position backbone is RNA
  misc_feature 17..23: note = At this position backbone is RNA
  misc_feature 25..33: note = At this position backbone is RNA

SEQ ID NO: 392 - DNA, 33 bp, synthetic construct; identical to SEQ ID NO: 197
  misc_feature 1..33: note = Description of sequence: Reference sequence for bifunctional oligonucleotide of SEQ ID NO: 197
  source 1..33: mol_type = other DNA
  misc_feature 1..15: note = At this position backbone is RNA
  misc_feature 17..19: note = At this position backbone is RNA
  misc_feature 21..27: note = At this position backbone is RNA
  misc_feature 29..33: note = At this position backbone is RNA

SEQ ID NO: 393 - DNA, 33 bp, synthetic construct; identical to SEQ ID NO: 198
  misc_feature 1..33: note = Description of sequence: Reference sequence for bifunctional oligonucleotide of SEQ ID NO: 198
  source 1..33: mol_type = other DNA
  misc_feature 1..27: note = At this position backbone is RNA
  misc_feature 29..33: note = At this position backbone is RNA

SEQ ID NO: 394 - DNA, 33 bp, synthetic construct; identical to SEQ ID NO: 199
  misc_feature 1..33: note = Description of sequence: Reference sequence for bifunctional oligonucleotide of SEQ ID NO: 199
  source 1..33: mol_type = other DNA
  misc_feature 1..27: note = At this position backbone is RNA
  misc_feature 29..33: note = At this position backbone is RNA

SEQ ID NO: 395 - DNA, 33 bp, synthetic construct; identical to SEQ ID NO: 200
  misc_feature 1..33: note = Description of sequence: Reference sequence for bifunctional oligonucleotide of SEQ ID NO: 200
  source 1..33: mol_type = other DNA
  misc_feature 1..19: note = At this position backbone is RNA
  misc_feature 21..27: note = At this position backbone is RNA
  misc_feature 29..33: note = At this position backbone is RNA

SEQ ID NO: 396 - DNA, 33 bp, synthetic construct; identical to SEQ ID NO: 201
  misc_feature 1..33: note = Description of sequence: Reference sequence for bifunctional oligonucleotide of SEQ ID NO: 201
  source 1..33: mol_type = other DNA
  misc_feature 1..19: note = At this position backbone is RNA
  misc_feature 21..23: note = At this position backbone is RNA
  misc_feature 25..31: note = At this position backbone is RNA
  misc_feature 33: note = At this position backbone is RNA

SEQ ID NO: 397 - DNA, 33 bp, synthetic construct; identical to SEQ ID NO: 202
  misc_feature 1..33: note = Description of sequence: Reference sequence for bifunctional oligonucleotide of SEQ ID NO: 202
  source 1..33: mol_type = other DNA
  misc_feature 1..31: note = At this position backbone is RNA
  misc_feature 33: note = At this position backbone is RNA

SEQ ID NO: 398 - DNA, 33 bp, synthetic construct; identical to SEQ ID NO: 203
  misc_feature 1..33: note = Description of sequence: Reference sequence for bifunctional oligonucleotide of SEQ ID NO: 203
  source 1..33: mol_type = other DNA
  misc_feature 1..31: note = At this position backbone is RNA
  misc_feature 33: note = At this position backbone is RNA

SEQ ID NO: 399 - DNA, 33 bp, synthetic construct; identical to SEQ ID NO: 204
  misc_feature 1..33: note = Description of sequence: Reference sequence for bifunctional oligonucleotide of SEQ ID NO: 204
  source 1..33: mol_type = other DNA
  misc_feature 1..23: note = At this position backbone is RNA
  misc_feature 25..31: note = At this position backbone is RNA
  misc_feature 33: note = At this position backbone is RNA

SEQ ID NO: 400 - DNA, 33 bp, synthetic construct; identical to SEQ ID NO: 205
  misc_feature 1..33: note = Description of sequence: Reference sequence for bifunctional oligonucleotide of SEQ ID NO: 205
  source 1..33: mol_type = other DNA
  misc_feature 1..15: note = At this position backbone is RNA
  misc_feature 17..33: note = At this position backbone is RNA

SEQ ID NO: 401 - RNA, 33 nt, synthetic construct; identical to SEQ ID NO: 206
  misc_feature 1..33: note = Description of sequence: Reference sequence for bifunctional oligonucleotide of SEQ ID NO: 206
  source 1..33: mol_type = other RNA

SEQ ID NO: 402 - DNA, 33 bp, synthetic construct; identical to SEQ ID NO: 207
  misc_feature 1..33: note = Description of sequence: Reference sequence for bifunctional oligonucleotide of SEQ ID NO: 207
  source 1..33: mol_type = other DNA
  misc_feature 1..27: note = At this position backbone is RNA
  misc_feature 29..33: note = At this position backbone is RNA

SEQ ID NO: 403 - DNA, 33 bp, synthetic construct; identical to SEQ ID NO: 208
  misc_feature 1..33: note = Description of sequence: Reference sequence for bifunctional oligonucleotide of SEQ ID NO: 208
  source 1..33: mol_type = other DNA
  misc_feature 1..27: note = At this position backbone is RNA
  misc_feature 29..31: note = At this position backbone is RNA
  misc_feature 33: note = At this position backbone is RNA

SEQ ID NO: 404 - DNA, 33 bp, synthetic construct; identical to SEQ ID NO: 209
  misc_feature 1..33: note = Description of sequence: Reference sequence for bifunctional oligonucleotide of SEQ ID NO: 209
  source 1..33: mol_type = other DNA
  misc_feature 1..19: note = At this position backbone is RNA
  misc_feature 21..33: note = At this position backbone is RNA

SEQ ID NO: 405 - RNA, 33 nt, synthetic construct; identical to SEQ ID NO: 210
  misc_feature 1..33: note = Description of sequence: Reference sequence for bifunctional oligonucleotide of SEQ ID NO: 210
  source 1..33: mol_type = other RNA

SEQ ID NO: 406 - DNA, 33 bp, synthetic construct; identical to SEQ ID NO: 211
  misc_feature 1..33: note = Description of sequence: Reference sequence for bifunctional oligonucleotide of SEQ ID NO: 211
  source 1..33: mol_type = other DNA
  misc_feature 1..31: note = At this position backbone is RNA
  misc_feature 33: note = At this position backbone is RNA

SEQ ID NO: 407 - DNA, 33 bp, synthetic construct; identical to SEQ ID NO: 212
  misc_feature 1..33: note = Description of sequence: Reference sequence for bifunctional oligonucleotide of SEQ ID NO: 212
  source 1..33: mol_type = other DNA
  misc_feature 1..31: note = At this position backbone is RNA
  misc_feature 33: note = At this position backbone is RNA

SEQ ID NO: 408 - DNA, 33 bp, synthetic construct; identical to SEQ ID NO: 213
  misc_feature 1..33: note = Description of sequence: Reference sequence for bifunctional oligonucleotide of SEQ ID NO: 213
  source 1..33: mol_type = other DNA
  misc_feature 1..15: note = At this position backbone is RNA
  misc_feature 17..23: note = At this position backbone is RNA
  misc_feature 25..33: note = At this position backbone is RNA

SEQ ID NO: 409 - DNA, 33 bp, synthetic construct; identical to SEQ ID NO: 214
  misc_feature 1..33: note = Description of sequence: Reference sequence for bifunctional oligonucleotide of SEQ ID NO: 214
  source 1..33: mol_type = other DNA
  misc_feature 1..15: note = At this position backbone is RNA
  misc_feature 17..33: note = At this position backbone is RNA

SEQ ID NO: 410 - RNA, 33 nt, synthetic construct; identical to SEQ ID NO: 215
  misc_feature 1..33: note = Description of sequence: Reference sequence for bifunctional oligonucleotide of SEQ ID NO: 215
  source 1..33: mol_type = other RNA

SEQ ID NO: 411 - RNA, 33 nt, synthetic construct; identical to SEQ ID NO: 216
  misc_feature 1..33: note = Description of sequence: Reference sequence for bifunctional oligonucleotide of SEQ ID NO: 216
  source 1..33: mol_type = other RNA

SEQ ID NO: 412 - DNA, 33 bp, synthetic construct; identical to SEQ ID NO: 217
  misc_feature 1..33: note = Description of sequence: Reference sequence for bifunctional oligonucleotide of SEQ ID NO: 217
  source 1..33: mol_type = other DNA
  misc_feature 1..19: note = At this position backbone is RNA
  misc_feature 21..27: note = At this position backbone is RNA
  misc_feature 29..33: note = At this position backbone is RNA

SEQ ID NO: 413 - DNA, 33 bp, synthetic construct; identical to SEQ ID NO: 218
  misc_feature 1..33: note = Description of sequence: Reference sequence for bifunctional oligonucleotide of SEQ ID NO: 218
  source 1..33: mol_type = other DNA
  misc_feature 1..19: note = At this position backbone is RNA
  misc_feature 21..33: note = At this position backbone is RNA

SEQ ID NO: 414 - RNA, 33 nt, synthetic construct; identical to SEQ ID NO: 219
  misc_feature 1..33: note = Description of sequence: Reference sequence for bifunctional oligonucleotide of SEQ ID NO: 219
  source 1..33: mol_type = other RNA

SEQ ID NO: 415 - RNA, 33 nt, synthetic construct; identical to SEQ ID NO: 220
  misc_feature 1..33: note = Description of sequence: Reference sequence for bifunctional oligonucleotide of SEQ ID NO: 220
  source 1..33: mol_type = other RNA

SEQ ID NO: 416 - DNA, 33 bp, synthetic construct; identical to SEQ ID NO: 221
  misc_feature 1..33: note = Description of sequence: Reference sequence for bifunctional oligonucleotide of SEQ ID NO: 221
  source 1..33: mol_type = other DNA
  misc_feature 1..23: note = At this position backbone is RNA
  misc_feature 25..31: note = At this position backbone is RNA
  misc_feature 33: note = At this position backbone is RNA

SEQ ID NO: 417 - DNA, 33 bp, synthetic construct; identical to SEQ ID NO: 222
  misc_feature 1..33: note = Description of sequence: Reference sequence for bifunctional oligonucleotide of SEQ ID NO: 222
  source 1..33: mol_type = other DNA
  misc_feature 1..23: note = At this position backbone is RNA
  misc_feature 25..33: note = At this position backbone is RNA

SEQ ID NO: 418 - DNA, 33 bp, synthetic construct; identical to SEQ ID NO: 223
  misc_feature 1..33: note = Description of sequence: Reference sequence for bifunctional oligonucleotide of SEQ ID NO: 223
  source 1..33: mol_type = other DNA
  misc_feature 1..15: note = At this position backbone is RNA
  misc_feature 17..33: note = At this position backbone is RNA

SEQ ID NO: 419 - RNA, 33 nt, synthetic construct; identical to SEQ ID NO: 224
  misc_feature 1..33: note = Description of sequence: Reference sequence for bifunctional oligonucleotide of SEQ ID NO: 224
  source 1..33: mol_type = other RNA

SEQ ID NO: 420 - DNA, 33 bp, synthetic construct; identical to SEQ ID NO: 225
  misc_feature 1..33: note = Description of sequence: Reference sequence for bifunctional oligonucleotide of SEQ ID NO: 225
  source 1..33: mol_type = other DNA
  misc_feature 1..27: note = At this position backbone is RNA
  misc_feature 29..33: note = At this position backbone is RNA

SEQ ID NO: 421 - DNA, 33 bp, synthetic construct; identical to SEQ ID NO: 226
  misc_feature 1..33: note = Description of sequence: Reference sequence for bifunctional oligonucleotide of SEQ ID NO: 226
  source 1..33: mol_type = other DNA
  misc_feature 1..15: note = At this position backbone is RNA
  misc_feature 17..27: note = At this position backbone is RNA
  misc_feature 29..33: note = At this position backbone is RNA

SEQ ID NO: 422 - DNA, 33 bp, synthetic construct; identical to SEQ ID NO: 227
  misc_feature 1..33: note = Description of sequence: Reference sequence for bifunctional oligonucleotide of SEQ ID NO: 227
  source 1..33: mol_type = other DNA
  misc_feature 1..19: note = At this position backbone is RNA
  misc_feature 21..33: note = At this position backbone is RNA

SEQ ID NO: 423 - RNA, 33 nt, synthetic construct; identical to SEQ ID NO: 228
  misc_feature 1..33: note = Description of sequence: Reference sequence for bifunctional oligonucleotide of SEQ ID NO: 228
  source 1..33: mol_type = other RNA

SEQ ID NO: 424 - DNA, 33 bp, synthetic construct; identical to SEQ ID NO: 229
  misc_feature 1..33: note = Description of sequence: Reference sequence for bifunctional oligonucleotide of SEQ ID NO: 229
  source 1..33: mol_type = other DNA
  misc_feature 1..6: note = At this position backbone is RNA
  misc_feature 8..10: note = At this position backbone is RNA
  misc_feature 12..33: note = At this position backbone is RNA

SEQ ID NO: 425 - DNA, 33 bp, synthetic construct; identical to SEQ ID NO: 230
  misc_feature 1..33: note = Description of sequence: Reference sequence for bifunctional oligonucleotide of SEQ ID NO: 230
  source 1..33: mol_type = other DNA
  misc_feature 1..18: note = At this position backbone is RNA
  misc_feature 20..33: note = At this position backbone is RNA

SEQ ID NO: 426 - DNA, 33 bp, synthetic construct; identical to SEQ ID NO: 231
  misc_feature 1..33: note = Description of sequence: Reference sequence for bifunctional oligonucleotide of SEQ ID NO: 231
  source 1..33: mol_type = other DNA
  misc_feature 1..6: note = At this position backbone is RNA
  misc_feature 8..33: note = At this position backbone is RNA

SEQ ID NO: 427 - RNA, 33 nt, synthetic construct; identical to SEQ ID NO: 232
  misc_feature 1..33: note = Description of sequence: Reference sequence for bifunctional oligonucleotide of SEQ ID NO: 232
  source 1..33: mol_type = other RNA

SEQ ID NO: 428 - RNA, 33 nt, synthetic construct; identical to SEQ ID NO: 233
  misc_feature 1..33: note = Description of sequence: Reference sequence for bifunctional oligonucleotide of SEQ ID NO: 233
  source 1..33: mol_type = other RNA

SEQ ID NO: 429 - RNA, 33 nt, synthetic construct; identical to SEQ ID NO: 234
  misc_feature 1..33: note = Description of sequence: Reference sequence for bifunctional oligonucleotide of SEQ ID NO: 234
  source 1..33: mol_type = other RNA

SEQ ID NO: 430 - DNA, 33 bp, synthetic construct; identical to SEQ ID NO: 235
  misc_feature 1..33: note = Description of sequence: Reference sequence for bifunctional oligonucleotide of SEQ ID NO: 235
  source 1..33: mol_type = other DNA
  misc_feature 1..2: note = At this position backbone is RNA
  misc_feature 4..33: note = At this position backbone is RNA

SEQ ID NO: 431 - RNA, 33 nt, synthetic construct; identical to SEQ ID NO: 236
  misc_feature 1..33: note = Description of sequence: Reference sequence for bifunctional oligonucleotide of SEQ ID NO: 236
  source 1..33: mol_type = other RNA

SEQ ID NO: 432 - RNA, 33 nt, synthetic construct; identical to SEQ ID NO: 237
  misc_feature 1..33: note = Description of sequence: Reference sequence for bifunctional oligonucleotide of SEQ ID NO: 237
  source 1..33: mol_type = other RNA

SEQ ID NO: 433 - RNA, 33 nt, synthetic construct; identical to SEQ ID NO: 238
  misc_feature 1..33: note = Description of sequence: Reference sequence for bifunctional oligonucleotide of SEQ ID NO: 238
  source 1..33: mol_type = other RNA

SEQ ID NO: 434 - DNA, 33 bp, synthetic construct; identical to SEQ ID NO: 239
  misc_feature 1..33: note = Description of sequence: Reference sequence for bifunctional oligonucleotide of SEQ ID NO: 239
  source 1..33: mol_type = other DNA
  misc_feature 1..6: note = At this position backbone is RNA
  misc_feature 8..18: note = At this position backbone is RNA
  misc_feature 20..33: note = At this position backbone is RNA

SEQ ID NO: 435 - RNA, 33 nt, synthetic construct; identical to SEQ ID NO: 240
  misc_feature 1..33: note = Description of sequence: Reference sequence for bifunctional oligonucleotide of SEQ ID NO: 240
  source 1..33: mol_type = other RNA

SEQ ID NO: 436 - RNA, 33 nt, synthetic construct; identical to SEQ ID NO: 241
  misc_feature 1..33: note = Description of sequence: Reference sequence for bifunctional oligonucleotide of SEQ ID NO: 241
  source 1..33: mol_type = other RNA

SEQ ID NO: 437 - DNA, 33 bp, synthetic construct; identical to SEQ ID NO: 242
  misc_feature 1..33: note = Description of sequence: Reference sequence for bifunctional oligonucleotide of SEQ ID NO: 242
  source 1..33: mol_type = other DNA
  misc_feature 1..10: note = At this position backbone is RNA
  misc_feature 12..33: note = At this position backbone is RNA

SEQ ID NO: 438 - RNA, 33 nt, synthetic construct; identical to SEQ ID NO: 243
  misc_feature 1..33: note = Description of sequence: Reference sequence for bifunctional oligonucleotide of SEQ ID NO: 243
  source 1..33: mol_type = other RNA

SEQ ID NO: 439 - DNA, 33 bp, synthetic construct; identical to SEQ ID NO: 244
  misc_feature 1..33: note = Description of sequence: Reference sequence for bifunctional oligonucleotide of SEQ ID NO: 244
  source 1..33: mol_type = other DNA
  misc_feature 1..14: note = At this position backbone is RNA
  misc_feature 16..33: note = At this position backbone is RNA

SEQ ID NO: 440 - DNA, 33 bp, synthetic construct; identical to SEQ ID NO: 245
  misc_feature 1..33: note = Description of sequence: Reference sequence for bifunctional oligonucleotide of SEQ ID NO: 245
  source 1..33: mol_type = other DNA
  misc_feature 1..6: note = At this position backbone is RNA
  misc_feature 8..33: note = At this position backbone is RNA

SEQ ID NO: 441 - DNA, 33 bp, synthetic construct; identical to SEQ ID NO: 246
  misc_feature 1..33: note = Description of sequence: Reference sequence for bifunctional oligonucleotide of SEQ ID NO: 246
  source 1..33: mol_type = other DNA
  misc_feature 1..10: note = At this position backbone is RNA
  misc_feature 12..18: note = At this position backbone is RNA
  misc_feature 20..33: note = At this position backbone is RNA

SEQ ID NO: 442 - DNA, 33 bp, synthetic construct; identical to SEQ ID NO: 247
  misc_feature 1..33: note = Description of sequence: Reference sequence for bifunctional oligonucleotide of SEQ ID NO: 247
  source 1..33: mol_type = other DNA
  misc_feature 1..14: note = At this position backbone is RNA
  misc_feature 16..33: note = At this position backbone is RNA

SEQ ID NO: 443 - DNA, 33 bp, synthetic construct; identical to SEQ ID NO: 248
  misc_feature 1..33: note = Description of sequence: Reference sequence for bifunctional oligonucleotide of SEQ ID NO: 248
  source 1..33: mol_type = other DNA
  misc_feature 1..10: note = At this position backbone is RNA
  misc_feature 12..18: note = At this position backbone is RNA
  misc_feature 20..33: note = At this position backbone is RNA

SEQ ID NO: 444 - DNA, 33 bp, synthetic construct; identical to SEQ ID NO: 249
  misc_feature 1..33: note = Description of sequence: Reference sequence for bifunctional oligonucleotide of SEQ ID NO: 249
  source 1..33: mol_type = other DNA
  misc_feature 1..14: note = At this position backbone is RNA
  misc_feature 16..18: note = At this position backbone is RNA
  misc_feature 20..33: note = At this position backbone is RNA

SEQ ID NO: 445 - DNA, 33 bp, synthetic construct; identical to SEQ ID NO: 250
  misc_feature 1..33: note = Description of sequence: Reference sequence for bifunctional oligonucleotide of SEQ ID NO: 250
  source 1..33: mol_type = other DNA
  misc_feature 1..2: note = At this position backbone is RNA
  misc_feature 4..10: note = At this position backbone is RNA
  misc_feature 12..33: note = At this position backbone is RNA

SEQ ID NO: 446 - DNA, 33 bp, synthetic construct; identical to SEQ ID NO: 251
  misc_feature 1..33: note = Description of sequence: Reference sequence for bifunctional oligonucleotide of SEQ ID NO: 251
  source 1..33: mol_type = other DNA
  misc_feature 1..6: note = At this position backbone is RNA
  misc_feature 8..33: note = At this position backbone is RNA

SEQ ID NO: 447 - DNA, 33 bp, synthetic construct; identical to SEQ ID NO: 252
  misc_feature 1..33: note = Description of sequence: Reference sequence for bifunctional oligonucleotide of SEQ ID NO: 252
  source 1..33: mol_type = other DNA
  misc_feature 1..2: note = At this position backbone is RNA
  misc_feature 4..33: note = At this position backbone is RNA

SEQ ID NO: 448 - RNA, 33 nt, synthetic construct; identical to SEQ ID NO: 253
  misc_feature 1..33: note = Description of sequence: Reference sequence for bifunctional oligonucleotide of SEQ ID NO: 253
  source 1..33: mol_type = other RNA

SEQ ID NO: 449 - RNA, 33 nt, synthetic construct; identical to SEQ ID NO: 254
  misc_feature 1..33: note = Description of sequence: Reference sequence for bifunctional oligonucleotide of SEQ ID NO: 254
  source 1..33: mol_type = other RNA

SEQ ID NO: 450 - RNA, 33 nt, synthetic construct; identical to SEQ ID NO: 125
  misc_feature 1..33: note = Description of sequence: Reference sequence for bifunctional oligonucleotide of SEQ ID NO: 255
  source 1..33: mol_type = other RNA

SEQ ID NO: 451 - RNA, 33 nt, synthetic construct; identical to SEQ ID NO: 125
  misc_feature 1..33: note = Description of sequence: Reference sequence for bifunctional oligonucleotide of SEQ ID NO: 256
  source 1..33: mol_type = other RNA

SEQ ID NO: 452 - RNA, 33 nt, synthetic construct; identical to SEQ ID NO: 125
  misc_feature 1..33: note = Description of sequence: Reference sequence for bifunctional oligonucleotide of SEQ ID NO: 257
  source 1..33: mol_type = other RNA

SEQ ID NO: 453 - RNA, 33 nt, synthetic construct; identical to SEQ ID NO: 125
  misc_feature 1..33: note = Description of sequence: Reference sequence for bifunctional oligonucleotide of SEQ ID NO: 258
  source 1..33: mol_type = other RNA

SEQ ID NO: 454 - RNA, 33 nt, synthetic construct; identical to SEQ ID NO: 125
  misc_feature 1..33: note = Description of sequence: Reference sequence for bifunctional oligonucleotide of SEQ ID NO: 259
  source 1..33: mol_type = other RNA

SEQ ID NO: 455 - RNA, 33 nt, synthetic construct; identical to SEQ ID NO: 125
  misc_feature 1..33: note = Description of sequence: Reference sequence for bifunctional oligonucleotide of SEQ ID NO: 260
  source 1..33: mol_type = other RNA

SEQ ID NO: 456 - RNA, 33 nt, synthetic construct; identical to SEQ ID NO: 125
  misc_feature 1..33: note = Description of sequence: Reference sequence for bifunctional oligonucleotide of SEQ ID NO: 261
  source 1..33: mol_type = other RNA

SEQ ID NO: 457 - RNA, 33 nt, synthetic construct; identical to SEQ ID NO: 125
  misc_feature 1..33: note = Description of sequence: Reference sequence for bifunctional oligonucleotide of SEQ ID NO: 262
  source 1..33: mol_type = other RNA

SEQ ID NO: 458 - DNA, 33 bp, synthetic construct; identical to SEQ ID NO: 184
  misc_feature 1..33: note = Description of sequence: Reference sequence for bifunctional oligonucleotide of SEQ ID NO: 263
  source 1..33: mol_type = other DNA
  misc_feature 1..27: note = At this position backbone is RNA
  misc_feature 29..33: note = At this position backbone is RNA

SEQ ID NO: 459 - DNA, 33 bp, synthetic construct; identical to SEQ ID NO: 184
  misc_feature 1..33: note = Description of sequence: Reference sequence for bifunctional oligonucleotide of SEQ ID NO: 264
  source 1..33: mol_type = other DNA
  misc_feature 1..27: note = At this position backbone is RNA
  misc_feature 29..33: note = At this position backbone is RNA

SEQ ID NO: 460 - DNA, 33 bp, synthetic construct; identical to SEQ ID NO: 184
  misc_feature 1..33: note = Description of sequence: Reference sequence for bifunctional oligonucleotide of SEQ ID NO: 265
  source 1..33: mol_type = other DNA
  misc_feature 1..27: note = At this position backbone is RNA
  misc_feature 29..33: note = At this position backbone is RNA

SEQ ID NO: 461 - DNA, 33 bp, synthetic construct; identical to SEQ ID NO: 184
  misc_feature 1..33: note = Description of sequence: Reference sequence for bifunctional oligonucleotide of SEQ ID NO: 266
  source 1..33: mol_type = other DNA
  misc_feature 1..27: note = At this position backbone is RNA
  misc_feature 29..33: note = At this position backbone is RNA

SEQ ID NO: 462 - DNA, 33 bp, synthetic construct; identical to SEQ ID NO: 184
  misc_feature 1..33: note = Description of sequence: Reference sequence for bifunctional oligonucleotide of SEQ ID NO: 267
  source 1..33: mol_type = other DNA
  misc_feature 1..27: note = At this position backbone is RNA
  misc_feature 29..33: note = At this position backbone is RNA

SEQ ID NO: 463 - DNA, 33 bp, synthetic construct; identical to SEQ ID NO: 184
  misc_feature 1..33: note = Description of sequence: Reference sequence for bifunctional oligonucleotide of SEQ ID NO: 268
  source 1..33: mol_type = other DNA
  misc_feature 1..27: note = At this position backbone is RNA
  misc_feature 29..33: note = At this position backbone is RNA

SEQ ID NO: 464 - DNA, 33 bp, synthetic construct; identical to SEQ ID NO: 184
  misc_feature 1..33: note = Description of sequence: Reference sequence for bifunctional oligonucleotide of SEQ ID NO: 269
  source 1..33: mol_type = other DNA
  misc_feature 1..27: note = At this position backbone is RNA
  misc_feature 29..33: note = At this position backbone is RNA

SEQ ID NO: 465 - DNA, 33 bp, synthetic construct; identical to SEQ ID NO: 184
  misc_feature 1..33: note = Description of sequence: Reference sequence for bifunctional oligonucleotide of SEQ ID NO: 270
  source 1..33: mol_type = other DNA
  misc_feature 1..27: note = At this position backbone is RNA
  misc_feature 29..33: note = At this position backbone is RNA

SEQ ID NO: 466 - DNA, 33 bp, synthetic construct; identical to SEQ ID NO: 191
  misc_feature 1..33: note = Description of sequence: Reference sequence for bifunctional oligonucleotide of SEQ ID NO: 271
  source 1..33: mol_type = other DNA
  misc_feature 1..19: note = At this position backbone is RNA
  misc_feature 21..33: note = At this position backbone is RNA

SEQ ID NO: 467 - DNA, 33 bp, synthetic construct; identical to SEQ ID NO: 191
  misc_feature 1..33: note = Description of sequence: Reference sequence for bifunctional oligonucleotide of SEQ ID NO: 272
  source 1..33: mol_type = other DNA
  misc_feature 1..19: note = At this position backbone is RNA
  misc_feature 21..33: note = At this position backbone is RNA

SEQ ID NO: 468 - DNA, 33 bp, synthetic construct; identical to SEQ ID NO: 191
  misc_feature 1..33: note = Description of sequence: Reference sequence for bifunctional oligonucleotide of SEQ ID NO: 273
  source 1..33: mol_type = other DNA
  misc_feature 1..19: note = At this position backbone is RNA
  misc_feature 21..33: note = At this position backbone is RNA

SEQ ID NO: 469 - DNA, 33 bp, synthetic construct; identical to SEQ ID NO: 191
  misc_feature 1..33: note = Description of sequence: Reference sequence for bifunctional oligonucleotide of SEQ ID NO: 274
  source 1..33: mol_type = other DNA
  misc_feature 1..19: note = At this position backbone is RNA
  misc_feature 21..33: note = At this position backbone is RNA

SEQ ID NO: 470 - DNA, 33 bp, synthetic construct; identical to SEQ ID NO: 191
  misc_feature 1..33: note = Description of sequence: Reference sequence for bifunctional oligonucleotide of SEQ ID NO: 275
  source 1..33: mol_type = other DNA
  misc_feature 1..19: note = At this position backbone is RNA
  misc_feature 21..33: note = At this position backbone is RNA

SEQ ID NO: 471 - DNA, 33 bp, synthetic construct; identical to SEQ ID NO: 191
  misc_feature 1..33: note = Description of sequence: Reference sequence for bifunctional oligonucleotide of SEQ ID NO: 276
  source 1..33: mol_type = other DNA
  misc_feature 1..19: note = At this position backbone is RNA
  misc_feature 21..33: note = At this position backbone is RNA

SEQ ID NO: 472 - DNA, 33 bp, synthetic construct; identical to SEQ ID NO: 191
  misc_feature 1..33: note = Description of sequence: Reference sequence for bifunctional oligonucleotide of SEQ ID NO: 277
  source 1..33: mol_type = other DNA
  misc_feature 1..19: note = At this position backbone is RNA
  misc_feature 21..33: note = At this position backbone is RNA

SEQ ID NO: 473 - DNA, 33 bp, synthetic construct; identical to SEQ ID NO: 191
  misc_feature 1..33: note = Description of sequence: Reference sequence for bifunctional oligonucleotide of SEQ ID NO: 278
  source 1..33: mol_type = other DNA
  misc_feature 1..19: note = At this position backbone is RNA
  misc_feature 21..33: note = At this position backbone is RNA

SEQ ID NO: 474 - DNA, 33 bp, synthetic construct; identical to SEQ ID NO: 218
  misc_feature 1..33: note = Description of sequence: Reference sequence for bifunctional oligonucleotide of SEQ ID NO: 279
  source 1..33: mol_type = other DNA
  misc_feature 1..19: note = At this position backbone is RNA
  misc_feature 21..33: note = At this position backbone is RNA

SEQ ID NO: 475 - DNA, 33 bp, synthetic construct; identical to SEQ ID NO: 218
  misc_feature 1..33: note = Description of sequence: Reference sequence for bifunctional oligonucleotide of SEQ ID NO: 280
  source 1..33: mol_type = other DNA
  misc_feature 1..19: note = At this position backbone is RNA
  misc_feature 21..33: note = At this position backbone is RNA

SEQ ID NO: 476 - DNA, 33 bp, synthetic construct; identical to SEQ ID NO: 218
  misc_feature 1..33: note = Description of sequence: Reference sequence for bifunctional oligonucleotide of SEQ ID NO: 281
  source 1..33: mol_type = other DNA
  misc_feature 1..19: note = At this position backbone is RNA
  misc_feature 21..33: note = At this position backbone is RNA

SEQ ID NO: 477 - DNA, 33 bp, synthetic construct; identical to SEQ ID NO: 218
  misc_feature 1..33: note = Description of sequence: Reference sequence for bifunctional oligonucleotide of SEQ ID NO: 282
  source 1..33: mol_type = other DNA
  misc_feature 1..19: note = At this position backbone is RNA
  misc_feature 21..33: note = At this position backbone is RNA

SEQ ID NO: 478 - DNA, 33 bp, synthetic construct; identical to SEQ ID NO: 218
  misc_feature 1..33: note = Description of sequence: Reference sequence for bifunctional oligonucleotide of SEQ ID NO: 283
  source 1..33: mol_type = other DNA
  misc_feature 1..19: note = At this position backbone is RNA
  misc_feature 21..33: note = At this position backbone is RNA

SEQ ID NO: 479 - DNA, 33 bp, synthetic construct; identical to SEQ ID NO: 218
  misc_feature 1..33: note = Description of sequence: Reference sequence for bifunctional oligonucleotide of SEQ ID NO: 284
  source 1..33: mol_type = other DNA
  misc_feature 1..19: note = At this position backbone is RNA
  misc_feature 21..33: note = At this position backbone is RNA

SEQ ID NO: 480 - DNA, 33 bp, synthetic construct; identical to SEQ ID NO: 218
  misc_feature 1..33: note = Description of sequence: Reference sequence for bifunctional oligonucleotide of SEQ ID NO: 285
  source 1..33: mol_type = other DNA
  misc_feature 1..19: note = At this position backbone is RNA
  misc_feature 21..33: note = At this position backbone is RNA

SEQ ID NO: 481 - DNA, 33 bp, synthetic construct; identical to SEQ ID NO: 218
  misc_feature 1..33: note = Description of sequence: Reference sequence for bifunctional oligonucleotide of SEQ ID NO: 286
  source 1..33: mol_type = other DNA
  misc_feature 1..19: note = At this position backbone is RNA
  misc_feature 21..33: note = At this position backbone is RNA

SEQ ID NO: 482 - DNA, 33 bp, synthetic construct; identical to SEQ ID NO: 195
  misc_feature 1..33: note = Description of sequence: Reference sequence for bifunctional oligonucleotide of SEQ ID NO: 287
  source 1..33: mol_type = other DNA
  misc_feature 1..23: note = At this position backbone is RNA
  misc_feature 25..33: note = At this position backbone is RNA

SEQ ID NO: 483 - DNA, 33 bp, synthetic construct; identical to SEQ ID NO: 195
  misc_feature 1..33: note = Description of sequence: Reference sequence for bifunctional oligonucleotide of SEQ ID NO: 288
  source 1..33: mol_type = other DNA
  misc_feature 1..23: note = At this position backbone is RNA
  misc_feature 25..33: note = At this position backbone is RNA

SEQ ID NO: 484 - DNA, 33 bp, synthetic construct; identical to SEQ ID NO: 195
  misc_feature 1..33: note = Description of sequence: Reference sequence for bifunctional oligonucleotide of SEQ ID NO: 289
  source 1..33: mol_type = other DNA
  misc_feature 1..23: note = At this position backbone is RNA
  misc_feature 25..33: note = At this position backbone is RNA

SEQ ID NO: 485 - DNA, 33 bp, synthetic construct; identical to SEQ ID NO: 195
  misc_feature 1..33: note = Description of sequence: Reference sequence for bifunctional oligonucleotide of SEQ ID NO: 290
  source 1..33: mol_type = other DNA
  misc_feature 1..23: note = At this position backbone is RNA
  misc_feature 25..33: note = At this position backbone is RNA

SEQ ID NO: 486 - DNA, 33 bp, synthetic construct; identical to SEQ ID NO: 195
  misc_feature 1..33: note = Description of sequence: Reference sequence for bifunctional oligonucleotide of SEQ ID NO: 291
  source 1..33: mol_type = other DNA
  misc_feature 1..23: note = At this position backbone is RNA
  misc_feature 25..33: note = At this position backbone is RNA

SEQ ID NO: 487 - DNA, 33 bp, synthetic construct; identical to SEQ ID NO: 195
  misc_feature 1..33: note = Description of sequence: Reference sequence for bifunctional oligonucleotide of SEQ ID NO: 292
  source 1..33: mol_type = other DNA
  misc_feature 1..23: note = At this position backbone is RNA
  misc_feature 25..33: note = At this position backbone is RNA

SEQ ID NO: 488 - DNA, 33 bp, synthetic construct; identical to SEQ ID NO: 195
  misc_feature 1..33: note = Description of sequence: Reference sequence for bifunctional oligonucleotide of SEQ ID NO: 293
  source 1..33: mol_type = other DNA
  misc_feature 1..23: note = At this position backbone is RNA
  misc_feature 25..33: note = At this position backbone is RNA

SEQ ID NO: 489 - DNA, 33 bp, synthetic construct; identical to SEQ ID NO: 195
  misc_feature 1..33: note = Description of sequence: Reference sequence for bifunctional oligonucleotide of SEQ ID NO: 294
  source 1..33: mol_type = other DNA
  misc_feature 1..23: note = At this position backbone is RNA
  misc_feature 25..33: note = At this position backbone is RNA

1. A bifunctional oligonucleotide comprising:
(i) an alternative splice site targeting sequence capable of binding an exonic element (e.g., 5′ splice site) within a target sequence (e.g., an RNA, e.g., a pre-mRNA or mRNA); and
(ii) a spliceosome targeting sequence capable of binding a spliceosome component (e.g., a U1 snRNP).

2. The bifunctional oligonucleotide of claim 1, wherein the bifunctional oligonucleotide is a single-stranded oligonucleotide.

3. The bifunctional oligonucleotide of claim 1, wherein the bifunctional oligonucleotide is an antisense oligonucleotide.

4. The bifunctional oligonucleotide of claim 1, wherein the bifunctional oligonucleotide is between 25 and 75 nucleotides in length (e.g, between 25 and 70 nucleotides, between 30 and 65 nucleotides, between 40 and 60 nucleotides).

5. The bifunctional oligonucleotide of claim 1, wherein the bifunctional oligonucleotide is between 5 and 50 nucleotides in length.

6. The bifunctional oligonucleotide of claim 1, wherein the sequence of (i) is between 5 and 35 nucleotides in length.

7. The bifunctional oligonucleotide of claim 1, wherein the sequence of (ii) is between 5 and 20 nucleotides in length.

8. The bifunctional oligonucleotide of claim 1, wherein the sequence of (i) is present at the 5′ terminus of the bifunctional oligonucleotide.

9. The bifunctional oligonucleotide of claim 1, wherein the sequence of (i) is present at the 3′ terminus of the bifunctional oligonucleotide.

10. The bifunctional oligonucleotide of claim 1, wherein the sequence of (ii) is present at the 5′ terminus of the bifunctional oligonucleotide.

11. The bifunctional oligonucleotide of claim 1, the sequence of (ii) is present at the 3′ terminus of the bifunctional oligonucleotide.

12. The bifunctional oligonucleotide of claim 1, comprising the structure of Formula (I): [chemical structure]
or a pharmaceutically acceptable salt thereof, wherein:
the alternative splice site targeting sequence comprises a nucleotide sequence capable of binding to a target sequence (e.g., an RNA, e.g., a pre-mRNA or mRNA) comprising an exonic element (e.g., an alternative splice site);
the spliceosome targeting sequence is a nucleotide sequence capable of binding to a spliceosome component (e.g., U1 snRNP), and
L is absent or a linker.

13. The bifunctional oligonucleotide of claim 1, comprising the structure of Formula (II): [chemical structure]
or a pharmaceutically acceptable salt thereof, wherein:
the alternative splice site targeting sequence comprises a nucleotide sequence capable of binding to a target sequence (e.g., an RNA, e.g., a pre-mRNA or mRNA) comprising an exonic element (e.g., an alternative splice site);
the spliceosome targeting sequence is a nucleotide sequence capable of binding to a spliceosome component (e.g., U1 snRNP), and
L is absent or a linker.

14. The bifunctional oligonucleotide of claim 1, 2 wherein the bifunctional oligonucleotide comprises a chemical modification (e.g., a non-naturally occurring chemical modification).

15. The bifunctional oligonucleotide of claim 14, wherein the chemical modification comprises a sugar modification, a nucleobase modification, a terminal modification, or an internucleotide linkage modification.

16. The bifunctional oligonucleotide of any of claims 14-15, wherein the chemical modification comprises a sugar modification (e.g, a 2′-ribose modification).

17. The bifunctional oligonucleotide of claim 16, wherein the sugar modification is a 2′-O-alkyl modification, a 2′-halo modification, or a 2′-deoxy modification.

18. The bifunctional oligonucleotide of any of claims 16-17, wherein the sugar modification comprises a 2′-OMe, 2′-MOE, 2′-H, 2′-Cl, 2′-F modification.

19. The bifunctional oligonucleotide of claim 14, wherein the chemical modification is a linked nucleic acid (LNA).

20. The bifunctional oligonucleotide of claim 14, wherein the chemical modification comprises a nucleobase modification (e.g., methylation).

21. The bifunctional oligonucleotide of claim 14, wherein the chemical modification comprises an internucleotide linkage modification (e.g., a phosphorothioate modification).

22. The bifunctional oligonucleotide of claim 4, wherein the bifunctional oligonucleotide comprises a plurality of chemical modifications.

23. The bifunctional oligonucleotide of claim 1, wherein the bifunctional oligonucleotide comprises a chemical modification within (i) and (ii).

24. The bifunctional oligonucleotide of claim 1, wherein the bifunctional oligonucleotide comprises a plurality of chemical modifications within (i) and (ii).

25. The bifunctional oligonucleotide of claim 1, wherein the bifunctional oligonucleotide comprises a plurality of sugar modifications or LNAs.

26. The bifunctional oligonucleotide of claim 1, wherein the bifunctional oligonucleotide comprises at least 1, 2, 3, 4, 5, 6, 7, 8, 9, 10, 15, 20, 25, 30, or more sugar modifications (e.g., 2′O-Me modifications).

27. The bifunctional oligonucleotide of claim 1, wherein the bifunctional oligonucleotide comprises at least 1, 2, 3, 4, 5, 6, 7, 8, 9, 10, 15, 20, 25, 30, or more LNAs.

28. The bifunctional oligonucleotide of claim 1, comprising the structure of Formula (I-b): [chemical structure]
or a pharmaceutically acceptable salt thereof, wherein the alternative splice site targeting sequence is a sequence selected from: AAAAGCAGAACCUGAGCGGC, UUCCAGGGUCGCCATGGCGG, UCAGCUTUUCCAGGGUCGCC, AAGGACTUGAGGGACUCGAA, and AAGGACTUGAGGGACUCGAA; and each of bases 1-33 may be optionally modified with one or modifications selected from: 2′OMe modification, locked nucleic acid modification (LNA), 2′-O-methoxy ethyl modification, and phosphorothioate modification

29. The bifunctional oligonucleotide of claim 28, wherein the alternative splice site targeting sequence comprises AAAAGCAGAACCUGAGCGGC.

30. The bifunctional oligonucleotide of claim 28, wherein the alternative splice site targeting sequence comprises UUCCAGGGUCGCCATGGCGG.

31. The bifunctional oligonucleotide of claim 28, wherein the alternative splice site targeting sequence comprises UCAGCUTUUCCAGGGUCGCC.

32. The bifunctional oligonucleotide of claim 28, wherein the alternative splice site targeting sequence comprises AAGGACTUGAGGGACUCGAA.

33. The bifunctional oligonucleotide of claim 28, wherein the alternative splice site targeting sequence comprises UUCAUCAGCUTUUCCAGGGU.

34. The bifunctional oligonucleotide of claim 28, wherein bases 1-15, 17-19, 21-23, 25-27, 29-31, and 33 comprise a 2′OMe modification; bases 2, 3, 4, and 5 comprise a phosphorothioate modification; and bases 16, 20, 24, 28, and 32 comprise an LNA modification.

35. The bifunctional oligonucleotide of claim 28, wherein bases 1-15, 17-19, 21-23, 25-27, 29-31, and 33 comprise a 2′OMe modification; bases 30, 31, 32, and 33 comprise a phosphorothioate modification; and bases 16, 20, 24, 28, and 32 comprise an LNA modification.

36. The bifunctional oligonucleotide of claim 28, wherein bases 1-15, 17-19, 21-23, 25-27, 29-31, and 33 comprise a 2′OMe modification; bases 2, 3, 4, 5, 30, 31, 32, and 33 comprise a phosphorothioate modification; and bases 16, 20, 24, 28, and 32 comprise an LNA modification.

37. The bifunctional oligonucleotide of claim 28, wherein bases 1-13 comprise a 2′OMe modification; bases 14, 15, 17-19, 21-23, 25-27, 29-31, and 33 comprise a 2′-O-methoxy ethyl modification; bases 30, 31, 32, and 33 comprise a phosphorothioate modification; and bases 16, 20, 24, 28, and 32 comprise an LNA modification.

38. The bifunctional oligonucleotide of claim 28, wherein bases 1-13 comprise a 2′OMe modification; bases 14, 15, 17-19, 21-23, 25-27, 29-31, and 33 comprise a 2′-O-methoxy ethyl modification; bases 2, 3, 4, 5, 30, 31, 32, and 33 comprise a phosphorothioate modification; and
bases 16, 20, 24, 28, and 32 comprise an LNA modification.

39. The bifunctional oligonucleotide of claim 28, wherein bases 1, 3, 5, 7, 9, and 11-13 comprise 2′-O-methoxy ethyl modification; bases 14, 15, 17-19, 21-23, 25-27, 29-31, and 33 comprise a 2′OMe modification; bases 2, 3, 4, 5, 30, 31, 32, and 33 comprise a phosphorothioate modification; and bases 2, 4, 6, 8, 10, 16, 20, 24, 28, and 32 comprise an LNA modification.

40. The bifunctional oligonucleotide of claim 28, wherein bases 1, 3, 5, 7, 9, 11-13, 14, 15, 17-19, 21-23, 25-27, 29-31, and 33 comprise a 2′-O-methoxy ethyl modification; bases 2, 3, 4, 5, 30, 31, 32, and 33 comprise a phosphorothioate modification; and bases 2, 4, 6, 8, 10, 16, 20, 24, 28, and 32 comprise an LNA modification.

41. The bifunctional oligonucleotide of claim 28, wherein bases 1, 3, 5, 7, 9, and 11-13 comprise 2′-O-methoxy ethyl modification; bases 14, 15, 17-19, 21-23, 25-27, 29-31, and 33 comprise a 2′OMe modification; bases 2, 3, 4, and 5 comprise a phosphorothioate modification; and bases 2, 4, 6, 8, 10, 16, 20, 24, 28, and 32 comprise an LNA modification.

42. The bifunctional oligonucleotide of claim 1, wherein the alternative splice site (e.g., 5′ splice site) is present within a gene containing a nucleotide repeat expansion.

43. The bifunctional oligonucleotide of claim 1, wherein the alternative splice site (e.g., 5′ splice site) is present within a gene containing a trinucleotide repeat expansion.

44. The bifunctional oligonucleotide of claim 1, wherein the alternative splice site (e.g., 5′ splice site) is present within any one of the genes listed in Table 3.

45. The bifunctional oligonucleotide of claim 1, wherein the alternative splice site (e.g., 5′ splice site) is present within the HTT gene.

46. The bifunctional oligonucleotide of claim 1, wherein the alternative splice site is present within exon 1 of the HTT gene.

47. The bifunctional oligonucleotide of claim 1, wherein the alternative splice site within exon 1 is upstream of a CAG region within exon 1.

48. The bifunctional oligonucleotide of claim 1, wherein the alternative splice site comprises the sequence GAGT (SEQ ID NO: 002) or AAGT (SEQ ID NO: 003).

49. The bifunctional oligonucleotide of any of the preceding claims, wherein the U1 snRNP is a wild type U1 snRNP or a variant or fragment thereof.

50. The bifunctional oligonucleotide of claim 1, wherein the bifunctional oligonucleotide comprises a sequence with at least 75%, 80%, 85%, 90%, 95%, 99%, or more sequence identity with SEQ ID NO: 004, or a variant or fragment thereof.

51. The bifunctional oligonucleotide of claim 1, wherein the sequence of (ii) comprises a sequence with at least 75%, 80%, 85%, 90%, 95%, 99%, or more sequence identity to SEQ ID NO: 004.

52. The bifunctional oligonucleotide of claim 1, wherein the sequence of (ii) comprises SEQ ID NO: 004.

53. The bifunctional oligonucleotide of claim 1, wherein the sequence of the bifunctional oligonucleotide is at least 75%, 80%, 85%, 90%, 95%, 99%, or more sequence identity with an oligonucleotide listed in Table 1 or 2, e.g., an oligonucleotide selected from SEQ ID NOs: 100-254, or a variant or fragment thereof.

54. The bifunctional oligonucleotide of claim 1, wherein the sequence of (i) comprises a sequence with at least 75%, 80%, 85%, 90%, 95%, 99%, or more sequence identity with a nucleotide selected from SEQ ID NOs: 100-254, or a variant or fragment thereof.

55. The bifunctional oligonucleotide of claim 1, wherein the sequence of (i) comprises a sequence selected from SEQ ID NOs: 100-254, or a variant or fragment thereof.

56. A bifunctional oligonucleotide comprising:
(i) a nucleotide sequence capable of binding to a splice site (e.g., 5′ splice site) within exon 1 of the HTT gene, wherein the nucleotide sequence comprises a plurality of chemical modifications (e.g., a plurality of 2′OMe modifications and LNA modifications) and is between 5 and 35 nucleotides in length; and
(b) a nucleotide sequence capable of binding an U1 snRNA comprising a plurality of chemical modifications (e.g., a plurality of 2′OMe modifications).

57. The bifunctional oligonucleotide of claim 1 or 56, wherein the bifunctional oligonucleotide is capable of one or more of:
(a) enhancing exonization of the HTT gene (e.g., exon 1) by recruiting the U1 snRNP to an alternative 5′ splice site;
(b) altering the sequence of the HTT gene (e.g., exon 1) by recruiting the U1 snRNP to an alternative 5′ splice site; and
(b) potentiating U1 usage/recruitment.

58. The bifunctional oligonucleotide of claim 57, comprising (a).

59. The bifunctional oligonucleotide of claim 57, comprising (b).

60. A pharmaceutical composition comprising a bifunctional oligonucleotide of any of claims 1-59.

61. The bifunctional oligonucleotide of any of claims 1-59, disposed in a delivery vehicle.

62. The bifunctional oligonucleotide of claim 61, wherein the delivery vehicle is a membrane-bound delivery vehicle.

63. The bifunctional oligonucleotide of claim 61, wherein the delivery vehicle comprises a liposome or lipid nanoparticle.

64. A method of modulating the production or level of a transcription product in a cell or subject comprising an exonic element (e.g., a trinucleotide expansion, e.g., a [CAG]ₙ site) in a subject or cell, wherein:
(i) the exonic element is flanked by a proximal splice site and a distal splice site, and
(ii) the proximal splice site and distal splice sites are both 5′ splice sites or are both 3′ splice sites;
comprising contacting said cell or subject with a bifunctional oligonucleotide promoting splicing at:
(a) the distal 5′ splice site to (a-i) decrease the production or level of a transcription product comprising the exonic element or (a-ii) increase the production or level of a transcription product lacking the exonic element; or
(b) the proximal 3′ splice site to (b-i) increase the production or level of a transcription product comprising the exonic element or (b-ii) decrease the production or level of a transcription product lacking the exonic element;
thereby modulating the production or level of a transcription product comprising an exonic element (e.g., a trinucleotide expansion, e.g., a [CAG], site).

65. The method of claim 64, comprising (a-i) or (a-ii).

66. The method of claim 64, comprising (a-i).

67. The method of claim 64, comprising (b-i) or (b-ii).

68. The method of claim 64, comprising (b-i).

69. The method of any of claims 64-68, wherein, the distal 5′ splice site is a non-canonical 5′ splice site.

70. The method of any of claims 64-69, wherein the proximal 5′ splice site is a canonical 5′ splice site.

71. The method of any of claims 64-70, wherein the distal 5′ splice site is a non-canonical 5′ splice site and the exonic element comprises a canonical 5′ spice site.

72. The method of any of claims 64-71, wherein the exonic element comprises a trinucleotide repeat.

73. The method of claim 72, wherein the trinucleotide repeat comprises the nucleotide sequence CXY, wherein each of X and Y is selected from A, T, G, and C.

74. The method of claim 72, wherein the trinucleotide repeat is selected from CAG, CGG, or CGG.

75. The method of claim 64, wherein the alternative splice site is the 5′ distal splice site.

76. The method of claim 64, wherein the production or level of a transcription product produced by splicing at the distal 5′ splice site is increased by at least 5%, 10%, 20%, 30%, 40%, 50%, 60%, 70%, 80%, or more, e.g., in comparison to a reference standard (e.g., the transcription product produced by splicing at proximal 5′ splice site, wild type transcription product, mutant transcription product, etc).

77. The method of claim 64, wherein the production or level of a transcription product produced by splicing at the proximal 5′ splice site is decreased by at least 5%, 10%, 20%, 30%, 40%, 50%, 60%, 70%, 80%, or more, e.g., in comparison to a reference standard (e.g., the transcription product produced by splicing at distal 5′ splice site, wild type transcription product, mutant transcription product, etc).

78. The method of claim 64, wherein the exonic element is flanked by a plurality of distal splice sites, e.g., distal 5′ splice sites.

79. The method of claim 64, wherein the exonic element is flanked by a plurality of proximal splice sites, e.g., proximal 5′ splice sites.

80. The method of any one of claims 64-79, wherein the ratio of:
(A) the production or level of a transcription product arising from splicing at the 5′ distal splice site (e.g., a less-favored, less efficient, or non-canonical splice site) to
(B) the production or level of a transcription product arising from splicing at the 5′ proximal splice site (e.g., a more-favored, more efficient, or a canonical splice site),
is between 1:1-10:1, or 1:1-1:10.

81. The method of claim 80, wherein the ratio of (A) to (B) is decreased by the modulating.

82. The method of claim 80, wherein the decrease of the ratio of (A) to (B) is about 5%, 10% 15%, 20% 25%, 30%, 35%, 40%, 45%, 50%, or more.

83. The method of claim 80, wherein the ratio of (A) to (B) is lower at one allele or chromosome (e.g., a mutant allele, e.g., an allele comprising a tri-nucleotide repeat) than at the other allele or chromosome (e.g., a non-mutant allele, e.g., an allele not comprising a tri-nucleotide repeat).

84. The method of claim 80, wherein the bifunctional oligonucleotide is a bifunctional oligonucleotide of any one of claims 1-45.

85. The method of claim 80, wherein the production or level of a transcription product produced by splicing at the distal 5′ splice site is increased by at least 5%, 10%, 20%, 30%, 40%, 50%, 60%, 70%, 80%, e.g., in comparison to a cell or subject not administered the bifunctional oligonucleotide.

86. The method of any one of claims 80-85, wherein the production or level of a transcription product produced by splicing at the proximal 5′ splice site is decreased by at least 5%, 10%, 20%, 30%, 40%, 50%, 60%, 70%, 80%, e.g., in comparison to a cell or subject not administered the bifunctional oligonucleotide.

87. The method of any one of claims 80-86, wherein the bifunctional oligonucleotide has one or more of the following properties:
(i) is capable of binding at or near to a distal 5′ splice site or a distal 3′ splice site;
(ii) is capable of binding at or near to a U1 snRNP (e.g., a mutant U1 snRNP); and
(iii) is capable of promoting splicing of a mutant pre-mRNA relative to a wild-type pre-mRNA.

88. The method of any one of claims 80-87, wherein the exonic element comprises the nucleotide sequence [CAG]ₙ, wherein n is an integer between 10 and 60.

89. The method of claim 80, wherein the nucleotide sequence [CAG]ₙ forms a double-stranded structure (e.g., hairpin structure).

90. The method of claim 80, wherein the modulating is dependent on the length of the nucleotide sequence [CAG]ₙ.

91. The method of claim 80, wherein the transcription product is an HTT mRNA.

92. The method of claim 80, wherein the exonic element is present within an exon of the HTT gene.

93. The method of claim 80, wherein the exonic element is present within exon 1 of the HTT gene.

94. The method of claim 80, wherein the distal 5′ splice site is present within exon 1 of the HTT gene.

95. The method of any one of claims 50-80, wherein the proximal splice site and the distal splice site are 3′splice sites.

96. The method of claim 81, comprising promoting splicing at the distal 3′ splice site to decrease the production or level of a transcription product comprising the exonic element.

97. The method of any one of claims 80-96, comprising promoting splicing at the distal 3′ splice site to increase the production or level of a transcription product that lacks the exonic element.

98. The method of any one of claims 80-97, wherein the distal splice site is a non-canonical 3′ splice site.

99. The method of any one of claims 80-98, wherein the proximal splice site is a canonical 3′ splice site.

100. The method of any one of claims 80-99, wherein the distal splice site is a non-canonical 3′ splice site and the gene comprises a canonical 3′ splice site disposed between the exonic element and cognate intron of the canonical 3′ splice site.

101. The method of claim 100, comprising promoting splicing at the proximal splice site to increase the production of a transcription product comprising the exonic element.

102. The method of claim 100, comprising promoting splicing at the proximal splice site to decrease the production or level of a transcription product lacking the exonic element.

103. The method of any of claims 80-102, wherein a first and second allele of the gene are present.

104. The method of claim 103, wherein the first allele is carried on a first chromosome and the second allele is carried on a second chromosome.

105. The method of any of claims 89-90, wherein the sequence of the exonic element of one allele differs from the sequence of the exonic element on the second allele.

106. The method of any of claims 89-91, wherein one allele comprises the exonic element and the other allele does not comprise the exonic element.

107. The method of any of claims 89-92, wherein
(i) a transcription product comprising a first form of the exonic element, e.g., a [CAG]ₙ, is transcribed from an allele on a first chromosome; and
(ii) a transcription product which lacks the first form of the exonic element, is transcribed from an allele on a second chromosome.

108. The method of any of claims 89-93, where one of the alleles on the first and second chromosome is wild type for the gene which is not disease-associated and the other is mutant or disease associated allele for the gene.

109. The method of claim 108, performed in vitro.

110. The method of claim 108, performed in vivo.

111. The method of any of claims 108-110, wherein splicing of the distal splice site is more efficient than is splicing of the proximal splice site.

112. A method of modulating splicing at an alternative splice site (e.g., a flanking an exonic element, e.g., a trinucleotide expansion, e.g., a [CAG],I site) wherein:
(i) the exonic element is flanked by a proximal splice site a distal splice site, and
(ii) the proximal splice site and distal splice sites are both 5′ splice sites or are both 3′ splice sites;
comprising
(a) (i) wherein the alternative splice site is the 5′ distal splice site, promoting splicing at the 5′ distal splice site, or
(b) (i) wherein the alternative splice site is the 3′ distal splice site, promoting splicing at the proximal 3′splice site;
thereby modulating splicing at an alternative splice site.

113. The method of claim 112, wherein the exonic element comprises a trinucleotide repeat.

114. The method of claim 112, wherein the trinucleotide repeat comprises the nucleotide sequence CXY, wherein each of X and Y is selected from A, T, G, and C.

115. The method of claim 112, wherein the trinucleotide repeat is selected from CAG, CGG, or CGG.

116. The method of any one of claims 112-115, wherein the alternative splice site is the 5′ distal splice site.

117. The method of any one of claims 112-116, wherein the alternative splice site is the 3′ distal splice site.

118. A method of modulating splicing at an alternative splice site within the HTT gene in a subject or cell, wherein the HTT gene comprises a [CAG]ₙ site and the splice site is present upstream of the [CAG]ₙ site.

119. The method of claim 118, comprising administering to the subject or cell an exogenous modulator.

120. A method of treating a trinucleotide repeat expansion disease comprising modulating splicing at an alternative splice site in a subject, wherein the alternative splice site is flanking an exonic element (e.g., a trinucleotide expansion, e.g., a [CAG]ₙ site) wherein:
(i) the exonic element is flanked by a proximal splice site a distal splice site, and
(ii) the proximal splice site and distal splice sites are both 5′ splice sites or are both 3′ splice sites;
comprising
(a) (i) wherein the alternative splice site is the 5′ distal splice site, promoting splicing at the 5′ distal splice site, or
(b) (i) wherein the alternative splice site is the 3′ distal splice site, promoting splicing at the proximal 3′splice site;
thereby treating a trinucleotide repeat expansion disease.

121. A method of treating a trinucleotide repeat expansion disease, comprising administering to a subject a bifunctional oligonucleotide of any one of claims 1-120, or a composition thereof.

121. A composition for use in treating a trinucleotide repeat expansion disease, comprising a bifunctional oligonucleotide of any one of claims 1-120.
